(19) United States
(12) Patent Application Publication
(10) Pub. No.: US 2015/0344975 A1
(43) Pub. Date: Dec. 3, 2015

(54) COMPOSITIONS AND METHODS FOR DETECTING, EXTRACTING, VISUALIZING, AND IDENTIFYING PROTOMYXZOA RHUEMATIC

(71) Applicants: Stephen E. Fry, Scottsdale, AZ (US); Jeremy Ellis, Mesa, AZ (US)

(72) Inventors: Stephen E. Fry, Scottsdale, AZ (US); Jeremy Ellis, Mesa, AZ (US)

(21) Appl. No.: 13/566,972

(22) Filed: Aug. 3, 2012

Related U.S. Application Data
(60) Provisional application No. 61/514,845, filed on Aug. 3, 2011.

(51) Int. Cl. C12Q 1/68

(52) U.S. Cl. CPC C12Q 1/6893

(57) ABSTRACT

Disclosed are compositions, kits, and methods for detecting, extracting, visualizing, and identifying Protomyxzoa Rhuematic.

### CROSS REFERENCE TO RELATED APPLICATION

[0001] This application claims the benefit of the earlier U.S. Provisional Patent Application, Ser. No. 61/514,845, filed Aug. 3, 2011, now pending, the entire disclosure of which being hereby incorporated entirely herein by reference.

### INCORPORATION-BY-REFERENCE OF MATERIAL ELECTRONICALLY FILED

[0002] Incorporated by reference in its entirety herein is a computer-readable nucleotide/amino acid sequence listing submitted concurrently herewith and identified as follows: One 3,142,063 byte ASCII (text) file named “Sequence Listing” created on Aug. 2, 2011.

### BACKGROUND

[0003] 1. Technical Field

[0004] This document relates to compositions and methods for detecting, extracting, visualizing, and identifying Protomyxzoa Rhuematic.

[0005] 2. Background

[0006] Rheumatic and inflammatory diseases have had a long history of links with infectious agents ranging from molecular mimicry effects to the direct activity of human pathogens.

### SUMMARY

[0007] Aspects of this document may comprise, and implementations may include, one or more or all of the components and steps set forth in the appended CLAIMS, which are hereby incorporated by reference.

[0008] One aspect of this document relates at least to an isolated DNA coding for a polypeptide, the isolated DNA having any one of the nucleotide sequences set forth in SEQ ID NO:1 through SEQ ID NO:8454 which are identifying for Protomyxzoa Rhuematic.

[0009] Another aspect of this document relates at least to an isolated oligonucleotide (by way of non-limiting example, a forward primer, a reverse primer, or a probe such as a molecular beacon) capable of detecting a unique biomarker (a fragment of DNA sequence that causes disease or is associated with susceptibility to disease) for Protomyxzoa Rhuematic, such as any one of the nucleotide sequences set forth in SEQ ID NO:1 through SEQ ID NO:8454.

[0010] Specifically, aspects of this document relate at least to identifying any one of the nucleotide sequences set forth in SEQ ID NO:1 through SEQ ID NO:8454 for Protomyxzoa Rhuematic using hot-start polymerase chain reaction (PCR) and employing specific and/or universal primers.

[0011] Still another aspect of this document relates to methods useful for detecting Protomyxzoa Rhuematic from a sample. Such methods may comprise aligning nucleotide sequences pair wise and determining the percent identities (percentage of identical matches) between the universal primers and the sample to be tested. In particular implementations, a reaction mixture or a kit may be provided comprising a first isolated oligonucleotide (a forward primer, in particular implementations), and a second isolated oligonucleotide (a reverse primer, in particular implementations).

[0012] Yet another aspect of this document relates to methods useful for detecting Protomyxzoa Rhuematic from a sample. Such methods may comprise determining whether a sample (by way of non-limiting examples, a blood sample, or other a biological sample, such as a swab specimen) contains Protomyxzoa Rhuematic, or has an increased likelihood of containing Protomyxzoa Rhuematic. Such a method may comprise the following: (a) providing a vessel containing a composition, wherein the composition contains first and second primers and a nucleic acid from the sample, wherein the composition is capable of amplifying by a polymerase chain reaction a segment of the nucleic acid to produce an amplicon, wherein production of the amplicon is primed by the first and second primers, wherein the first primer is capable of hybridizing under highly stringent hybridization conditions to a polynucleotide consisting of the nucleotide sequence of one of: any one of the nucleotide sequences set forth in SEQ ID NO:1 through SEQ ID NO:8454; ATGGCTCATTATATCAGTTATAGT; and CCATGCATGTCTAAGTATA; and wherein the second primer is capable of hybridizing under highly stringent hybridization conditions to a polynucleotide consisting of the nucleotide sequence of one of: any one of the nucleotide sequences set forth in SEQ ID NO:1 through SEQ ID NO:8454; and GTTATTATGATTCACCAAACAAG; (b) incubating the vessel under conditions allowing production of the amplicon if the sample contains Protomyxzoa Rhuematic; and (c) determining that the sample contains pathogen Protomyxzoa Rhuematic if the amplicon is detected or that the sample has an increased likelihood of containing pathogen Protomyxzoa Rhuematic if the amplicon is detected, or determining that the sample does not contain Protomyxzoa Rhuematic if the amplicon is not detected or that the sample does not have an increased likelihood of containing Protomyxzoa Rhuematic if the amplicon is not detected.

[0013] The vessel may also contain an oligonucleotide probe capable of detecting the amplicon if the amplicon is produced, the probe consisting of the nucleotide sequence of FAM-ACATCCTTT/ZEN/CCGTGAGGTCAGGAGTT-3IABkFQ.

[0014] The sample may be an extracted sample obtained by one of an expanded extraction method and an enrichment, expanded extraction method as described below.

[0015] The foregoing and other aspects, features, and advantages will be apparent to those of ordinary skill in the art from the DESCRIPTION and DRAWINGS, and from the CLAIMS.

### BRIEF DESCRIPTION OF DRAWINGS

[0016] The patent or application file contains at least one drawing executed in color. Copies of this patent or patent application publication with color drawing(s) will be provided by the Office upon request and payment of the necessary fee.

[0017] Implementations will hereinafter be described in conjunction with the appended DRAWINGS, where any like designations denote like elements.

[0018] FIG. 1 is a dual Dual Hoechst and EtBr DNA stain (1000×) revealing large amorphous clusters, 20-100 μm in diameter, including bacteria (yellow arrows) and organisms, Protomyxzoa Rhuematic, (white arrows) with varying dye permeability, and red blood cells (arrow heads).

[0019] FIGS. 2 and 3 are PAS and Hoechst stains respectively revealing that the extracellular matrix material associated with the clusters of FIG. 1 contain both DNA and polysaccharides.

[0020] FIG. 4 show the gel results for a detection study revealing a mixed population of organisms, including Proteobacteria (primarily Ralstonia spp.), fungi, and sequences suggestive of a novel protozoan species Protomyxzoa Rhuematic.

[0021] FIG. 5 depicts two panels that are modified May-Grünwald stains (1000×), the Left Panel showing ring forms within red blood cells (yellow arrow) found in association with biofilms and may represent part of the organisms life cycle, and the Right Panel showing biofilm detection with embedded organisms (yellow arrow) which are rarely detected by traditional means.

[0022] FIG. 6 depicts two panels that are fluorescent DNA stains revealing the presence of biofilms in patients with chronic inflammatory and neurologic disease, the Left Panel showing a high magnification (400×) image revealing irregular size organisms bound by a DNA rich biofilm matrix, and the Right Panel showing a low magnification (100×) image demonstrating the lymphocytic response with adherent white blood cells (yellow arrows) to a large biofilm cluster.

### DESCRIPTION

### Overview, Terminology, Case Study, and Evidence

[0023] The majority of genes act by specifying polypeptide chains that form proteins. Proteins in turn make up living matter and catalyze all cellular processes.

[0024] Chemically, a genome is composed of deoxy-ribonucleic acid (“DNA”). Each DNA molecule is made up of repeating units of four nucleotide bases—adenine (“A”), thymine (“T”), cytosine (“C”), and guanine (“G”)—which are covalently linked, or bonded, 2 together via a sugar-phosphate, or phosphodiester, backbone. DNA generally exists as two DNA strands intertwined as a double helix in which each base on a strand pairs, or hybridizes, with a complementary base on the other strand: A pairs with T, and C with G.

[0025] The linear order of nucleotide bases in a DNA molecule is referred to as its “sequence.” The sequence of a gene is thus denoted by a linear sequence of As, Ts, Gs, and Cs. “DNA sequencing” or “gene sequencing” refers to the process by which the precise linear order of nucleotides in a DNA segment or gene is determined. A gene's nucleotide sequence in turn encodes for a linear sequence of amino acids that comprise the protein encoded by the gene. Most genes have both “exon” and “intron” sequences. Exons are DNA segments that are necessary for the creation of a protein, i.e., that code for a protein. Introns are segments of DNA interspersed between the exons that, unlike exons, do not code for a protein.

[0026] The creation of a protein from a gene comprises two steps: transcription and translation. First, the gene sequence is “transcribed” into a different nucleic acid called ribonucleic acid (“RNA”). RNA has a chemically different sugar-phosphate backbone than DNA, and it utilizes the nucleotide base uracil (“U”) in place of thymine (“T”). For transcription, the DNA double helix is unwound and each nucleotide on the non-coding, or tem-plate, DNA strand is used to make a complementary RNA molecule of the coding DNA strand, i.e., adenine on the template DNA strand results in uracil in the RNA molecule, thymine results in adenine, guanine in cytosine, and cytosine in guanine. The resulting “pre-RNA,” like the DNA from which it was generated, contains both exon and intron sequences. Next, the introns are physically excised from the pre-RNA molecule, in a process called “splicing,” to produce a messenger RNA (“mRNA”).

[0027] Following transcription, the resulting mRNA is “translated” into the encoded protein. Genes, and their corresponding mRNAs, encode proteins via three-nucleotide combinations called codons. Each codon corresponds to one of the twenty amino acids that make up all proteins or a “stop” signal that terminates protein translation. For example, the codon adenine-thymine-guanine (ATG, or UTG in the corresponding mRNA), encodes the amino acid methionine. The relationship between the sixty-four possible codon sequences and their corresponding amino acids is known as the genetic code.

[0028] Changes, or mutations, in the sequence of a gene can alter the structure as well as the function of the resulting protein. Small-scale changes include point mutations in which a change to a single nucleotide alters a single amino acid in the encoded protein. For example, a base change in the codon GCU to CGU changes an alanine in the encoded protein to an arginine. Larger scale variations include the deletion, rearrangement, or duplication of larger DNA segments, ranging from several hundreds to over a million nucleotides, and result in the elimination, misplacement, or duplication of an entire gene or genes. While some mutations have little or no effect on processes, others result in disease, or an increased risk of developing a particular disease. DNA sequencing is used in clinical diagnostic testing to determine whether a gene contains mutations associated with a particular disease or risk of a particular disease.

[0029] Nearly every cell contains an entire genome. DNA in the cell, called “native” or “genomic” DNA, is packaged into chromosomes. Chromosomes are complex structures of a single DNA molecule wrapped around proteins called histones.

[0030] Genomic DNA can be extracted from its cellular environment using a number of well-established laboratory techniques. A particular segment of DNA, such as a gene, can then be excised or amplified from the DNA to obtain the isolated DNA segment of interest. DNA molecules can also be synthesized in the laboratory. One type of synthetic DNA molecule is complementary DNA (“cDNA”). cDNA is synthesized from mRNA using complementary base pairing in a manner analogous to RNA transcription. The process results in a double-stranded DNA molecule with a sequence corresponding to the sequence of an mRNA produced by the body. Because it is synthesized from mRNA, cDNA contains only the exon sequences, and thus none of the intron sequences, from a native gene sequence.

[0031] An oligonucleotide is a short segment of RNA or DNA, typically comprising approximately thirty or fewer nucleotide bases. Oligonucleotides may be formed by the cleavage or division of longer RNA/DNA segments, or may by synthesized by polymerizing individual nucleotide precursors, such as by polymerase chain reaction (PCR) and/or other known techniques. Automated synthesis techniques such as PCR may allow the synthesis of oligonucleotides up to 160 to 200 nucleotide bases. With respect to PCR, an oligonucleotide is commonly referred to as a “primer,” which allows DNA polymerase to extend the oligonucleotide and replicate the complementary strand. The length of an oligonucleotide is typically denoted in terms of “mer.” By way of non-limiting example, an oligonucleotide having 25 nucleotide bases would be characterized as a 25-mer oligonucleotide. Because oligonucleotides readily bind to their respective complementary nucleotide, they may used as probes for detecting particular DNA or RNA. The oligonucleotides can be made with standard molecular biology techniques known in the art and disclosed in manuals such as Sambrook et al., Molecular Cloning: A Laboratory Manual, Cold Spring Harbor Laboratory Press, Cold Spring Harbor, N.Y., USA (1989) or conventional nucleotide phosphoramidite chemistry and commercially available synthesizer instruments. The oligonucleotides can be DNA or RNA. Also contemplated are the RNA equivalents of the oligonucleotides and their complements.

[0032] The term “primer” refers to an isolated single stranded oligonucleotide sequence capable of acting as a point of initiation for synthesis of a primer extension product which is complementary to the nucleic acid strand to be copied. The length and the sequence of the primer must be such that they allow to prime the synthesis of the extension products. A primer is about 5-50 nucleotides long, more specifically from 10 to 40 nucleotides long. Specific length and sequence will depend on the complexity of the required DNA or RNA targets, as well as on the conditions of primer use such as temperature and ionic strength.

[0033] The oligonucleotides used as primers or probes may also comprise nucleotide analogues such as phosphorothiates, alkylphosphorothiates or peptide nucleic acids or may contain intercalating agents.

[0034] As most other variations or modifications introduced into the original DNA sequences, these variations will necessitate adaptions with respect to the conditions under which the oligonucleotide should be used to obtain the required specificity and sensitivity. However the eventual results of hybridization will be essentially the same as those obtained with the unmodified oligonucleotides.

[0035] The introduction of these modifications may be advantageous in order to positively influence characteristics such as hybridization kinetics, reversibility of the hybrid-formation, biological stability of the oligonucleotide molecules, etc.

[0036] The two main pan-genus polymerase chain reaction (PCR) based detection methods may be used to survey the presence of rare and/or unknown variants of organisms. Both PCR assays have distinct advantages and disadvantages that differ from both a scientist and clinician perspective.

[0037] First, traditional PCR based detection methods utilize specific primers to amplify identifying sequences of an organism. Amplified products are visualized via gel electrophoresis and bands that are within a certain size range can be further analyzed by restriction enzyme digest or by sequence analysis. This approach has significant advantages due to the flexibility in choices of primer design. Primers can be designed intentionally to amplify entire groups of related organisms and the stringency can be controlled by altering the primer positions, primer degeneracy, and primer annealing temperatures. Having the flexibility to make few assumptions about the target organism could provide detection of rare or novel species, thus providing immediate benefit to clinicians and their patients.

[0038] However, this method is not without some weaknesses. Moderate stringency PCRs produces some potential positives that, upon sequence analysis, are identified as artifacts which give the false appearance of a positive PCR signal. Therefore, effort spent on sequencing these false bands was wasted. Furthermore, the fact that this method intentionally is of moderate stringency opposes finely tuned and optimized detection levels. Other PCR based methods could allow exceptionally sensitive detection down to even a single organismal genome in an entire patient sample. Thus far, it appears as if clinicians are willing to accept some loss of sensitivity for the increased chance at detecting rare or novel species.

[0039] Second, a newer PCR based detection technique utilizes quantitative PCR (qPCR) that uses either fluorescently labeled nucleotides or probes to spectroscopically measure the levels of amplified product. This technique requires highly optimized and stringent probes, thus reducing the probability of pan-genus detection. However, qPCR is sensitive enough to detect exceptionally low copy numbers of the organismal genome.

[0040] The term “probe” refers to isolated single stranded sequence-specific oligonucleotides which have a sequence which is complementary to the target sequence to be detected. Complementarity of the probe sequence to the target sequence is essential and complete for the central part of the probe (=core of the probe), where no mismatches to the target sequence are allowed. Towards the extremities (3′ or 5′) of the probe, minor variations in the probe sequence may sometimes occur, without affecting the species specific hybridization behavior of the probe. The “core sequence” of the probe is the central part, and represents more than 70%, more than 80%, most often more than 90% of the total probe sequence.

[0041] The probes disclosed herein specifically hybridize to Protomyxzoa Rhuematic for which they are designed. Throughout this document, the sequences of the probes are always represented from the 5′ end to the 3′ end. They are represented as single stranded DNA molecules. It should be understood however that these probes may also be used in their RNA form (wherein T is replaced by U), or in their complementary form.

[0042] Probes may be formed by cloning of recombinant plasmids containing inserts comprising the corresponding nucleotide sequences, if need be by cleaving the latter out from the cloned plasmids upon using the adequate nucleases and recovering them, e.g. by fractionation according to molecular weight. The probes according to the present invention can also be synthesized chemically, for instance by the conventional phospho-triester method.

[0043] Some of the probes disclosed herein have a length from about 10 to about 30 nucleotides. Variations are possible in the length of the probes and it should be clear that, since the central part of the probe is essential for its hybridization characteristics, possible deviations of the probe sequence versus the target sequence may be allowable towards head and tail of the probe, especially when longer probe sequences are used. These variant probes, should however always be evaluated experimentally, in order to check if they result in equivalent hybridization characteristics than the original probes.

[0044] The term “isolated” as used herein means that the oligonucleotides disclosed herein are isolated from the environment in which they naturally occur. In particular, it means that they are not an % more part of the genome of the respective species, and thus liberated from the remaining flanking nucleotides in the target region of the species. On the contrary, new (=heterologous) flanking regions may be added to the 3′ and/or 5′ end of the probe, in order to enhance its functionality. Functional characteristics possibly provided by said heterologous flanking sequences are e.g. ease of attachment to a solid support, ease of synthesis, ease of purification, labeling function etc.

[0045] The term “complementary” nucleic acid as used herein means that the nucleic acid sequences can form a perfect base-paired double helix with each other.

[0046] The term “specific hybridization” refers to a selective hybridization of the probes disclosed herein to the nucleic acids of Protomyxzoa Rhuematic to be detected (=target organism), and not to nucleic acids originating from strains belonging to other species (=non-target organisms). Specific hybridization in the context of the present disclosure also implies a selective hybridization of the disclosed probes to the target region of Protomyxzoa Rhuematic to be detected, and limits occasional “random” hybridization to other genomic sequences. Specificity is a feature which has to be experimentally determined. Although it may sometimes be theoretically predictable, specificity can only refer to those non-target organisms which have been tested experimentally.

[0047] The term “sample” represents any material possibly containing nucleic acids, which may have to be released from the cells. Preferably, the term “sample” refers to a clinical sample, such as a sample taken from blood, from the respiratory tract (sputum, bronchoalveolar lavage (BAL)), from cerebrospinal fluid (CSF), from the urogenital tract (vaginal secretions, urine), from the gastrointestinal tract (saliva, faeces) or biopsies taken from organs, tissue, ski, etc. The term “sample” may also refer to a sample of cultured cells, either cultured in liquid medium or on solid growth media. DNA present in said samples may be prepared or extracted according to any of the techniques known in the art.

[0048] The “target” material in these samples may be either genomic DNA or precursor ribosomal RNA of the organism to be detected (=target organism), or amplified versions thereof. These molecules are called target nucleic acids.

[0049] The term “isolated” oligonucleotide refers to an oligonucleotide that is found in a condition other than its native environment. In a preferred form, the oligonucleotide is substantially free from other nucleic acid sequences, such as other chromosomal and extrachromosomal DNA and RNA, that normally accompany or interact with it as found in its naturally occurring environment. The term “isolated” oligonucleotide also embraces recombinant oligonucleotides and chemically synthesized oligonucleotides.

[0050] The term “test sample” as used herein, means anything designated for testing for the presence of an organism and/or the nucleic acid of an organism. The test sample is, or can be derived from any biological source, such as for example, blood, blood plasma, cell cultures, tissues and mosquito samples. The test sample can be used directly as obtained from the source, or following a pre-treatment to modify the character of the sample. Thus, the test sample can be pre-treated prior to use by, for example, preparing plasma from blood, disrupting cells or viral particles, preparing liquids from solid materials, diluting viscous fluids, filtering liquids, distilling liquids, concentrating liquids, inactivating interfering components, adding reagents, and purifying nucleic acid.

[0051] Case Study—In Situ Hematologic Biofilm Communities in 3 Patients with ALS

[0052] Abstract—Spontaneous Amyotrophic Lateral Sclerosis, Lou Gehrig's disease (ALS) is a debilitating neurologic disease with an unknown cause and poor prognosis. Efforts to determine the etiology have not been conclusive. It is believed that ALS has an infectious trigger and the causative pathogen could be found in the peripheral circulation, and that the utilization of careful microscopic, histological, and molecular techniques could provide insight into the mechanism of disease. Suspecting that ALS is an infectious disease with great antibiotic resistance, the existence of a biofilm-based pathogen was postulated. Peripheral smears from three ALS patients were examined with a variety of stains and techniques. Molecular analysis of peripheral blood samples using broad fungal, prokaryotic and protozoan probes was done. Results indicated the presence of biofilm communities. Molecular analysis suggested the presence of protozoan, bacterial, and fungal organisms.

[0053] Case Report—Spontaneous Amyotrophic Lateral Sclerosis, Lou Gehrig's disease (ALS) is a debilitating neurologic disease with an unknown cause and poor prognosis. Recent work has demonstrated chronic cerebral venous insufficiency (CCVI) in Multiple Sclerosis (MS) patients (1). Clearance of CCVI membranous obstruction by percutaneous transluminal angioplasty results in clinical improvement in MS. It has been suggested that the same mechanism may be present in ALS (2). It is believed that ALS is an infectious disease with great antibiotic resistance, and the existence of a biofilm based pathogen was postulated. This biofilm could manifest as the macroscopic membranes visualized in the work by Zamboni.

[0054] Peripheral blood samples from three ALS patients were collected after obtaining informed consent. This study was approved by the Fry Laboratories institutional review committee. All three patients were diagnosed by a board certified neurologist. A number of techniques were utilized including Hoechst staining, modified May-Gr\ddot{υ}newald, Periodic Acid-Schiff Reagent, Giemsa and light microscopy techniques (3). Molecular analysis by PCR was done by using bacterial, fungal, and protozoan primers. Microscopic examination of stained smears revealed an abundance of epierythrocytic bacteria attached to peripheral red blood cells. These were 1-2 micrometers in diameter, coccoid and coccobacillary, and consistent with the description of Hemobartonella published in the human and veterinary literature (4).

[0055] Examination of histological preparations revealed amorphous clusters of material that on first impression appear to be artifact or ‘dirt’. Further examination with high power microscopy, Hoechst stain, Ethidium Bromide, or Giemsa staining revealed a mixed population of eukaryotic appearing organisms, adherent lymphocytes, and smaller bacterial shapes consistent with the organisms previously observed and described as Hemobartonella. The sizes of these clusters were 20-100 micrometers. PAS stain revealed a polysaccharide matrix found throughout contributing to cluster morphology. The composition and appearance of these clusters were consistent with previous published and observed biofilm communities (5).

[0056] DNA was extracted from peripheral blood and assessed by PCR using general and specific bacterial, fungal and protozoan primers. Analysis of PCR products by sequencing and BLAST confirmed mixed populations of organisms. These consisted of Proteobacteria (primarily Ralstonia spp.), fungi, human DNA, and evidence suggestive of protozoans. All three patients with ALS displayed similar findings.

[0057] Microscopic study of stained blood smears from the 3 ALS patients revealed 1-2 μm diameter epierythrocytic bacteria, while fluorescent DNA staining techniques revealed large amorphous clusters, 20-100 μm in diameter, consisting of eukaryotic organisms, adherent lymphocytes, and bacteria (FIG. 1—Cluster fragment from ALS patient peripheral blood 1000×, excitation @ 620 nm; Ethidium Bromide and Hoechst stain; visible are multiple organisms from coccobaciili to larger eukaryotic organisms representative of a complex biofilm community). Additionally, Hoechst (FIG. 3) and PAS (FIG. 2) stains reveal that the extracellular matrix material associated with these clusters contain both DNA and polysaccharides. The morphology of these structures was consistent with what is observed in environmental biofilm communities. DNA extracted from peripheral blood was assessed by PCR using bacterial, fungal, and protozoan primers. Subsequent sequencing and analysis revealed a mixed population of organisms, including Proteobacteria (primarily Ralstonia spp.), fungi, and sequences suggestive of a novel protozoan species (Table 1 and FIG. 4). Microscopic observations combined with PCR results are consistent with a persistent biofilm community found in the peripheral blood of these patients with ALS.

[0058] Thus, observation under microscopy and PCR based methods are consistent with a protozoan foundation pathogen and primary biofilm former. It is believed that ALS may be caused by a foundation protozoan which produces a polysaccharide biofilm, hosting a communalistic environment for additional microorganisms. These clusters consist of a biofilm matrix and are freely circulating in the peripheral vascular system. Continued host lymphocytic response is evidenced by both PCR and microscopy. It is suspected that Fungi and Proteobacteria spp. are opportunistic members of this biofilm community. The postulated mechanism of disease is a gross obstructive sludging and macroscopic mechanical coagulation producing ischemia, retrograde venous flow, and poor nutrient supply to the surrounding tissues.

[0059] The concept of eukaryotic biofilms has been demonstrated recently in the case of the fungi P. carinii (6). Protozoan biofilms represent an emerging area in need of further study, particularly their role in ALS and other diseases. The identity of the protozoan foundation pathogen is Protomyxzoa Rhuematic described below.

[0060] References are as follows:
[0061] 1. Bromberg M B. Pathogenesis of amyotrophic lateral sclerosis: a critical review. Curr Opin Neurol 1999; 12:581-588.
[0062] 2. Ince P G, Lowe J, Shaw P J. Amyotrophic lateral sclerosis: current issues in classification, pathogenesis, and molecular pathology. Neuropathology and Applied Neurobiology 1998; 24:104-117.
[0063] 3. Bancroft J D, Gamble M. Theory and practice of Histological Techniques, 6th ed. Philadelphia: Churchill Livingstone; 2007.
[0064] 4. Willi B, Boretti F S, Tasker S, Meli M, Wengi N, et al. From Haemobartonella to hemoplasma: molecular methods provide new insights. Vet Microbiol 2007; 125:197-209.
[0065] 5. Hall-Stoodley L, Stoodley P. Evolving concepts in biofilm infections. Cell Microbiol 2009; 11:1034-1043.
[0066] 6. Cushion M T, Collins M S, Linke M J. Biofilm formation by Pneumocystis spp. Eukaryot Cell 2009; 8:197-206.

### Protomyxzoa Rhuematic: A Novel Infectious Organism; Missing Etiology in Chronic Disease

[0067] Rheumatic and inflammatory diseases have had a long history of links with infectious agents ranging from molecular mimicry effects to the direct activity of human pathogens. The following orphan diseases and conditions are of keen interest: Chronic Fatigue Syndrome; Fibromyalgia; Ulcerative Colitis; Gulf War Veterans Illness; Scleroderma; ALS (Lou Gehrig's Disease); Rheumatoid Arthritis; Parkinson's Disease; Osteoarthritis; Multiple Sclerosis; Crohn's Disease; and Autism.

[0068] Using a basic science approach and microscopic techniques Protomyxzoa Rhuematic (See FIG. 1) was found in patients with a wide range of chronic diseases. It is believed that Protomyxzoa Rhuematic is a novel hematologic biofilm-forming protozoan with Malaria-like and Babesia-like characteristics. Protomyxzoa Rhuematic is primarily hematogenous, lipid loving, complex (probably ‘Myxozoan’), and very drug resistant, but antiprotozoals and antihelminthics may be efficacious. Furthermore, research indicates that multiple species may be found cohabitating within the Protomyxzoa Rhuematic biofilm. Biofilm communities with Protomyxzoa Rhuematic as the foundation pathogen cause gross obstructive sludging resulting in macroscopic mechanical coagulation and retrograde venous flow. This results in ischemia and poor nutrient supply to surrounding tissues and chronic infection (chronic inflammatory response by lymphocytes).

[0069] Thus, initial results indicate that a variety of pathogenic bacteria and potential viruses are harbored within the biofilm matrix and may be pathogenic factors. Results are consistent with this novel organism having profound biofilm forming properties that are likely related to observed clinical significance in patients with chronic inflammatory diseases. It is not difficult to hypothesize that deficits in blood perfusion may contribute or exacerbate symptoms in these patients.

[0070] This research has transitioned from merely microscopic study to molecular characterization and genomic sequencing of Protomyxzoa Rhuematic. The existence of Protomyxzoa Rhuematic and continued study may be critically important to the treatment and outcome of patients with chronic inflammatory and neurologic diseases.

[0071] Identifying Sequences

[0072] The accompanying SEQUENCE LISTING (which is hereby incorporated herein by reference) identifies 8,454 sequences (SEQ ID NO:1 through SEQ ID NO:8454) that are representative for Protomyxzoa Rheumatic.

[0073] Advanced Detection

[0074] First, research microscopic techniques that were instrumental in the discovery of Protomyxzoa Rhuematic have been adapted for use as a clinical diagnostic assay. A proprietary Advanced Stain test is not only specifically designed to detect biofilm based infections in aqueous samples, but it has been rigorously shown to detect known pathogens from bacterial infections, to disseminated fungal infections, to protozoans such as Malaria and Babesia. The principle of this assay relies on the simple fact that infectious organisms have DNA. By adding specific DNA dye to the samples coupled with fluorescent microscopy, a direct visualization of hematologic infections can be documented for health care professional and physician use. Blood samples are particularly well suited for this type of staining technique because red blood cells do not have nuclear DNA, thus appearing as a dark backdrop against infectious organisms that shine brightly, with the patient white blood cells providing an excellent internal control for staining quality.

[0075] In addition to microscopy-based detection of biofilms by an Advanced Stain test, a Protomyxzoa Rhuematic PCR based test can be used. This assay provides information about the detectable levels of Protomyxzoa Rhuematic in a patient sample.

[0076] This suite of tools will assist health care professionals to accurately identify, monitor, and treat patients found to harbor Protomyxzoa Rhuematic.

### Compositions and Methods

[0077] There are many aspects of compositions and methods for detecting protozoan pathogen Protomyxzoa Rhuematic disclosed herein, of which one, a plurality, or all aspects may be used in any particular implementation.

[0078] It is to be understood that various implementations may be utilized, and compositional, as well as procedural, changes may be made without departing from the scope of this document. As a matter of convenience, various compositions and methods will be described using exemplary materials, sizes, specifications, and the like. However, this document is not limited to the stated examples and other configurations are possible and within the teachings of the present disclosure.

[0079] Implementations of the disclosed compositions and methods relate generally to oligonucleotides useful in methods for determining whether a sample contains Protomyxzoa Rhuematic. Although, any recombinant products such as peptides and the like are within the scope of this disclosure, which could also be used as diagnostics for markers or in immunological testing as antigens.

[0080] In one aspect, protozoan pathogen Protomyxzoa Rhuematic may be identified using any of the 5′-3′ sequences set forth in the SEQUENCE LISTING.

[0081] In another aspect, implementations of the disclosed compositions and methods relate generally to oligonucleotides, recombinant products such as peptides, and the like useful in methods for determining whether a sample contains protozoan pathogen Protomyxzoa Rhuematic, or has an increased likelihood of containing protozoan pathogen Protomyxzoa Rhuematic, a new genus and species of organism which is seen in conjunction with CFS, Fibromyalgia, the autoimmune diseases, ALS, MS, Parkinson's disease, Autism, and the like.

[0082] Isolated oligonucleotides (by way of non-limiting example, a forward primer, a reverse primer, or a probe such as a molecular beacon) are capable of detecting a unique biomarker for the protozoan pathogen Protomyxzoa Rhuematic species.

### Example 1

[0083] For the exemplary purposes of this disclosure, as one example, the following 5′-3′ sequence (SEQUENCE NODE 0), from the protozoan pathogen Protomyxzoa Rhuematic species, can be detected by real time quantitative PCR using the following primers and probe (PRIMERS/PROBES) to amplify and detect a 153 base pair fragment with the following PCR conditions (CONDITIONS).

[0084] (Sequence Node 0)

[0085] <NODE_{—}0_length_{—}429_cov_{—}3.000000;DNA;>

CCATGCATGTCTAAGTATAAGCACTTATACAGTGAAACTGCGAATGGCTCA
TTATATCAGTTATAGTTTATT
TGATAGTCCCTACTACTTGGATAACCGTAGTAATTCTAGAGCTAATACATG
CGCTAACTCCTGACCTCACGG
AAAGGATGTATTTATTAGATACAACCAACCTTGTTTGGTGAATCATAATAA
CTGAGCGAACCGCATGCTTCG
GCGGCGGTGGTTCATTCAAGTTTCTGACCTATCAGCTTTCGATGGTAGGGT
ATTGGCCTACCATGGCGTTAA
CGGGTAACGGAGAATTAGGGTTCGATTCCGGAGAGGGAGCCTGAGAGATGG
CTACCACATCCAAGGAAGGCA
GCAGGCGCGTAAATTACCCAATCCTGACACAGGGAGGTAGTGACAAGAAAT
AACAATGCGGAGCCTTCG

[0086] (Primers/Probes)

FL1953_F2
(5′-ATGGCTCATTATATCAGTTATAGT-3′)
FL1953_R1
(5′-GTTATTATGATTCACCAAACAAG-3′)
FL1953_PROBE
(5′-FAM-ACATCCTTT/ZEN/CCGTGAGGTCAGGAGTT-
3IABkFQ-3′)

[0087] (Conditions)

[0088] 37° C. 15 min

[0089] 95° C. 10 min

[0090] 50 cycles of: 95° C. 30 sec; 60° C. 1 min; 72° C. 30 sec

### Example 2

[0091] For the exemplary purposes of this disclosure, as another example, standard PCR using the following (PRIMERS-STANDARD PCR) can amplify a 196 base pair fragment, also for the sequence above (SEQUENCE NODE 0), that can be visualized by gel electrophoresis.

[0092] (Primers-Standard PCR)

FL1953_F1
(5′-CCATGCATGTCTAAGTATA-3′)
FL1953_R1
(5′-GTTATTATGATTCACCAAACAAG-3′)

[0093] In still another aspect, test kits useful for detecting Protomyxzoa Rhuematic from a sample may comprise at least one oligonucleotide disclosed in this document. The test kits may contain one or more pairs of oligonucleotides such as the primer pairs disclosed herein, or one or more oligonucleotide sets as disclosed herein. The assay kit can further comprise the four-deoxynucleotide phosphates (dATP, dGTP, dCTP, dTTP) and an effective amount of a nucleic acid polymerizing enzyme. A number of enzymes are known in the art which are useful as polymerizing agents. These include, but are not limited to E. coli DNA polymerase I, Klenow fragment, bacteriophage T7 RNA polymerase, reverse transcriptase, and polymerases derived from thermophilic bacteria, such as Thermus aquaticus. The latter polymerases are known for their high temperature stability, and include, for example, the Taq DNA polymerase I. Other enzymes such as Ribonuclease H can be included in the assay kit for regenerating the template DNA. Other optional additional components of the kit include, for example, means used to label the probe and/or primer (such as a fluorophore, quencher, chromogen, etc.), and the appropriate buffers for reverse transcription, PCR, or hybridization reactions. The kit may also contain instructions for carrying out the methods.

[0094] In yet another aspect, methods useful for detecting protozoan pathogen Protomyxzoa Rhuematic from one or more samples may comprise aligning nucleotide sequences pair wise and determining the percent identities (percentage of identical matches) between universal or specific primers and the sample to be tested. In particular implementations, a reaction mixture or a kit may be provided comprising an isolated oligonucleotide (a forward primer, in particular implementations). In other particular implementations, a second isolated oligonucleotide, different than the first isolated oligonucleotide (a reverse primer, in particular implementations) may be provided. The primers are capable of hybridizing under highly stringent hybridization conditions to a polynucleotide consisting of any one of the nucleotide sequences set forth in SEQ ID NO:1 through SEQ ID NO:8454.

[0095] Methods useful for detecting protozoan pathogen Protomyxzoa Rhuematic from one or more samples may further comprise a method for determining whether a sample (by way of non-limiting examples, a blood sample, or other a biological sample, such as a swab specimen) contains protozoan pathogen Protomyxzoa Rhuematic or has an increased likelihood of containing protozoan pathogen Protomyxzoa Rhuematic, wherein the method comprises the following: (a) providing a vessel containing a composition, wherein the composition contains a primer and a nucleic acid from the sample, wherein the composition is capable of amplifying by a polymerase chain reaction a segment of the nucleic acid to produce an amplicon, wherein production of the amplicon is primed by the primer, wherein the primer is capable of hybridizing under highly stringent hybridization conditions to a polynucleotide consisting of any one of the nucleotide sequences set forth in SEQ ID NO:1 through SEQ ID NO:8454; (b) incubating the vessel under conditions allowing production of the amplicon if the sample contains protozoan pathogen Protomyxzoa Rhuematic, and (c) determining that the sample contains protozoan pathogen Protomyxzoa Rhuematic if the amplicon is detected, or that the sample has an increased likelihood of containing protozoan pathogen Protomyxzoa Rhuematic if the amplicon is detected, or otherwise determining that the sample does not contain protozoan pathogen Protomyxzoa Rhuematic if the amplicon is not detected or that the sample does not have an increased likelihood of containing protozoan pathogen Protomyxzoa Rhuematic if the amplicon is not detected.

[0096] Alternatively, in step (b) of the method above, the vessel may contain an oligonucleotide probe (by way of non-limiting example, a molecular beacon) capable of detecting the amplicon if the amplicon is produced in (b).

[0097] The amplifying step can be performed using any type of nucleic acid template-based method, such as PCR technology.

[0098] PCR technology relies on thermal strand separation followed by thermal dissociation. During this process, at least one primer per strand, cycling equipment, high reaction temperatures and specific thermostable enzymes are used (U.S. Pat. Nos. 4,683,195 and 4,883,202). Alternatively, it is possible to amplify the DNA at a constant temperature (Nucleic Acids Sequence Based Amplification (NASBA) Kievits, T., et al., J. Virol Methods, 1991; 35, 273-286; and Malek, L. T., U.S. Pat. No. 5,130,238; T7 RNA polymerase-mediated amplification (TMA) (Giachetti C, et al. J Clin Microbiol 2002 July; 40(7):2408-19; or Strand Displacement Amplification (SDA), Walker, G. T. and Schram, J. L., European Patent Application Publication No. 0 500 224 A2; Walker, G. T., et al., Nuc. Acids Res., 1992; 20, 1691-1696).

[0099] Amplified nucleic acid can be detected using a variety of detection technologies well known in the art. For example, amplification products may be detected using agarose gel by performing electrophoresis with visualization by ethidium bromide staining and exposure to ultraviolet (UV) light, by sequence analysis of the amplification product for confirmation, or hybridization with an oligonucleotide probe.

[0100] The oligonucleotide probe may be labeled with a detectable label. The detectable label can be any molecule or moiety having a property or characteristic that is capable of detection, such as, for example, radioisotopes, fluorophores, chemiluminophores, enzymes, colloidal particles, and fluorescent microparticles.

[0101] Probe sequences can be employed using a variety of methodologies to detect amplification products. Generally all such methods employ a step where the probe hybridizes to a strand of an amplification product to form an amplification product/probe hybrid. The hybrid can then be detected using labels on the primer, probe or both the primer and probe. Examples of homogeneous detection platforms for detecting amplification products include the use of FRET (fluorescence resonance energy transfer) labels attached to probes that emit a signal in the presence of the target sequence. “TaqMan” assays described in U.S. Pat. Nos. 5,210,015; 5,804,375; 5,487,792 and 6,214,979 (each of which is herein incorporated by reference) and Molecular Beacon assays described in U.S. Pat. No. 5,925,517 (herein incorporated by reference) are examples of techniques that can be employed to detect nucleic acid sequences. With the “TaqMan” assay format, products of the amplification reaction can be detected as they are formed or in a so-called “real time” manner. As a result, amplification product/probe hybrids are formed and detected while the reaction mixture is under amplification conditions.

[0102] For example, the PCR probes may be TaqMan® probes that are labeled at the 5′ end with a fluorophore and at the 3′-end with a quencher molecule. Suitable fluorophores and quenchers for use with TaqMan® probes are disclosed in U.S. Pat. Nos. 5,210,015, 5,804,375, 5,487,792 and 6,214,979 and WO 01/86001 (Biosearch Technologies). Quenchers may be Black Hole Quenchers disclosed in WO 01/86001.

[0103] Nucleic acid hybridization can be done using techniques and conditions known in the art. Specific hybridization conditions will depend on the type of assay in which hybridization is used. Hybridization techniques and conditions can be found, for example, in Tijssen (1993) Laboratory Techniques in Biochemistry and Molecular Biology—Hybridization with Nucleic Acid Probes, Part I, Chapter 2 (Elsevier, N.Y.); and Ausubel et al., eds. (1995) Current Protocols in Molecular Biology, Chapter 2 (Greene Publishing and Wiley-Interscience, New York) and Sambrook et al. (1989) Molecular Cloning. A Laboratory Manual (2d ed., Cold Spring Harbor Laboratory Press, Plainview, N.Y.).

[0104] Hybridization of nucleic acid may be carried out under stringent conditions. By “stringent conditions” or “stringent hybridization conditions” is intended conditions under which a probe will hybridize to its target sequence to a detectably greater degree than to other sequences (e.g., at least 2-fold over background). Stringent conditions are sequence-dependent and will be different in different circumstances. By controlling the stringency of the hybridization and/or washing conditions, target sequences that are 100% complementary to the probe can be identified. Alternatively, stringency conditions can be adjusted to allow some mismatching in sequences so that lower degrees of similarity are detected.

[0105] Typically, stringent conditions will be those in which the salt concentration is less than about 1.5 M Na ion, typically about 0.01 to 1.0 M Na ion concentration (or other salts) at pH 7.0 to 8.3 and the temperature is at least about 30.degree. C. for short probes (e.g., 10 to 50 nucleotides) and at least about 60.degree. C. for long probes (e.g., greater than 50 nucleotides). Stringent conditions may also be achieved with the addition of destabilizing agents such as formamide. Exemplary low stringency conditions include hybridization with a buffer solution of 30 to 35% formamide, 1 M NaCl, 1% SDS (sodium dodecyl sulphate) at 37.degree. C., and a wash in 1.times. to 2.times.SSC (20.times.SSC=3.0 M NaCl/0.3 M trisodium citrate) at 50 to 55.degree. C. Exemplary moderate stringency conditions include hybridization in 40 to 45% formamide, 1.0 M NaCl, 1% SDS at 37.degree. C., and a wash in 0.5.times. to 1.times.SSC at 55 to 60.degree. C. Exemplary high stringency conditions include hybridization in 50% formamide, 1 M NaCl, 1% SDS at 37.degree. C., and a wash in 0.1.times.SSC at 60 to 65.degree. C. The duration of hybridization is generally less than about 24 hours, usually about 4 to about 12 hours, or less depending on the assay format.

[0106] It should be noted that the oligonucleotides of this disclosure can be used as primers or probes, depending on the intended use or assay format. For example, an oligonucleotide used as a primer in one assay can be used as a probe in another assay. The grouping of the oligonucleotides into primer pairs and primer/probe sets reflects certain implementations only. However, the use of other primer pairs comprised of forward and reverse primers selected from different preferred primer pairs is specifically contemplated.

[0107] Isolation of the DNA sequences described above and in this disclosure from packed red blood samples of patients diagnosed with a disease for example may be accomplished according to the methods disclosed herein.

[0108] By way of non-limiting example, the amplified bacterial PCR product may be purified using commercially-available purification kits such as, by way of non-limiting example, the QIAquick® PCR purification kit manufactured by Quiagen, Inc. Sequencing may be performed with the primers described previously (Gerard 1997) using commercially-available capillary sequencers such as, by way of non-limiting example, a 3730 capillary sequencer manufactured by Applied Biosystems. In addition, the sequences may be analyzed using commercially-available sequence databases such as, by way of non-limiting example, the GenBank sequence database (BLASTN 2.2.8 program).

[0109] By way of other examples, the detection of Protomyxzoa Rhuematic by PCR can be achieved by the following methods: A. An expanded extraction followed by a Protomyxzoa Rhuematic specific PCR (C.); B. A sample enrichment, subsequent expanded extraction followed by a Protomyxzoa Rhuematic specific PCR (C.); and C. Protomyxzoa Rhuematic specific PCR.

[0110] A. Expanded Extraction Method

[0111] The following expanded extraction procedure is an “extreme” extraction procedure. Most other organisms and DNA would be destroyed.

[0112] This method also requires the Protomyxzoa Rhuematic specific PCR discussed below in section C. for reproducible detection of the Protomyxzoa Rhuematic genomic fragment.

[0113] The steps are as follows:

[0114] 1. 750 μL of Qiagen Buffer AL is measured using a P1000 and dispensed into a labeled Zymo Research ZR Bashing Bead Lysis Tube.

[0115] 2. Next, 200 μL of whole EDTA preserved blood is measured using a P200 and added to the same tube.

[0116] 3. The screw cap of the Bashing Bead Lysis Tube is secured tightly and the sample is briefly vortexed.

[0117] 4. The sample is placed in a centrifuge and briefly spun at 8000 rpm (˜6000 g) to remove solution from the screw cap.

[0118] 5. 40 μL of reconstituted Proteinase K (>600 mAU/mL) is added to the sample in the Bashing Bead Lysis Tube. Note: The brand of Proteinase K does not appear to make any difference on efficiency of extraction and Qiagen's proprietary Protease may be substituted in most circumstances.

[0119] 6. The screw cap of the Bashing Bead Lysis Tube is secured tightly and the sample is briefly vortexed.

[0120] 7. The sample is then incubated for 5 minutes at 56° C. on a heating block.

[0121] 8. The sample is then vortexed at maximum speed for 30 second.

[0122] 9. The sample is then incubated for 5 minutes at 56° C. on a heating block.

[0123] 10. The sample is then vortexed at maximum speed for 5 second.

[0124] 11. The sample is allowed to rest for 5 second at room temperature.

[0125] 12. Steps 10 and 11 are repeated 5 times. Proceed to step 13 after the final repetition of step 11.

[0126] 13. The sample is then incubated for 2 minutes at 56° C. on a heating block.

[0127] 14. The sample is then vortexed at maximum speed for 5 minutes using a tube holder.

[0128] 15. The sample is then incubated for 5 minutes at 56° C. on a heating block.

[0129] 16. The sample is then vortexed at maximum speed for 1 minute.

[0130] 17. The sample is then incubated for 5 minutes at 56° C. on a heating block.

[0131] 18. The sample is then vortexed at maximum speed for 1 minute. Note: Additional vortexing and incubation steps may improve sample recovery, but the preceding steps represent a minimal series of steps.

[0132] 19. The sample is placed in a centrifuge and briefly spun at 8000 rpm (˜6000 g) to remove solution from the screw cap.

[0133] 20. Prepare a Zymo Research Zymo-Spin IV Spin Filter by snapping off and removing the flow through plug, place the Spin Filter into the provided collection tube, and label the accompanying orange screw cap.

[0134] 21. 600 μL of the sample is decanted using a P1000 and dispensed into the Spin Filter and the accompanying orange screw cap should be affixed securely. Note: Avoid aspirating beads from the Bashing Bead Lysis tube by moving the tip in a circular motion while decanting the sample as the beads may block the pipette tip from functioning.

[0135] 22. The Spin Filter is placed in a centrifuge and spun at 8000 rpm (˜6000 g) for 1 minute.

[0136] 23. 3004 of molecular biology grade 100% ethanol is added to the resulting flow through in the collection tube and mixed by repeated pipetting.

[0137] 24. 7004 of the flow though and ethanol mix is added to a labeled QIAamp Mini Spin Column (in a 2 mL collection tube) using a P1000 without wetting the rim.

[0138] 25. The cap is gently closed and the tube is placed in a centrifuge and spun at 8000 rpm (˜6000 g) for 1 minute.

[0139] 26. The Spin Column is placed in a new 2 mL collection tube and the old collection tube with resulting filtrate is discarded.

[0140] 27. The Spin Column is gently opened and 5004 of Buffer AW1 is added using a P1000 without wetting the rim.

[0141] 28. The cap is gently closed and the tube is place in a centrifuge and spun at 8000 rpm (˜6000 g) for 1 minute.

[0142] 29. The Spin Column is placed in a new 2 mL collection tube and the old collection tube with resulting filtrate is discarded.

[0143] 30. The Spin Column is gently opened and 500 μL of Buffer AW2 is added using a P1000 without wetting the rim.

[0144] 31. The cap is gently closed and the tube is placed in a centrifuge and spun at maximum rpm (˜20,000 g) for 1 minute.

[0145] 32. The Spin Column is placed in a new 1.5 mL microcentrifuge tube and the old collection tube with resulting filtrate is discarded.

[0146] 33. 30 μL of Buffer AE is added to the Spin Column and incubated for 2 minutes at room temperature. Note: Alteration of elution volume may increase template concentration.

[0147] 34. After incubation the sample is placed in a centrifuge and spun at 8000 rpm (˜6000 g) for 1 minute.

[0148] 35. The Spin Column is discarded. The resulting labeled and dated tube contains purified DNA from the starting blood sample.

[0149] 36. The sample concentration may be determined by Nano-Drop or traditional spectrophotometer methods. Note: Expected concentration ranges between 5 ng/μL to 50 ng/μL, depending on the state and quality of the blood sample.

[0150] 37. For short term storage the DNA sample may be kept at −20° C. For long term storage the DNA sample should be kept at −70° C.

[0151] 38. Proceed to section C. below for PCR conditions and methods.

[0152] B. Combined Sample Enrichment and Expanded Extraction Method

[0153] This method requires both a sample enrichment method and expanded extraction method as discussed above in section A. in addition to the Protomyxzoa Rhuematic specific PCR discussed below in section C. for reproducible detection of the Protomyxzoa Rhuematic genomic fragment.

[0154] The steps are as follows:

[0155] 1. Measure out 1.5 mL of well mixed human blood (EDTA preserved blood, although other blood preservation methods and possibly serum may work) into a new labeled 1.5 mL Eppendorf tube.

[0156] 2. Place the tube into the microcentrifuge and spin at 300 g for 15 minutes.

[0157] 3. Carefully remove tube and decant the supernatant off the sample into a new labeled 1.5 mL Eppendorf tube using a P200. Be careful not to aspirate any of the blood cells. Leaving some of the supernatant reduces the introduction of any blood cells.

[0158] 4. Place the tube into the microcentrifuge and spin at 14,000 or maximum g for 10 minutes.

[0159] 5. Carefully remove the tube and decant the supernatant off the pellet. Be careful to not disturb the pellet that formed in the bottom of the tube. Discard the supernatant.

[0160] 6. Add 200 μL of molecular biology grade water to the pellet and pulse vortex until the pellet is fully resuspended.

[0161] 7. 750 μL of Qiagen Buffer AL is measured using a P1000 and dispensed into a labeled Zymo Research ZR Bashing Bead Lysis Tube.

[0162] 8. All 2004 of the resuspended sample is added to the same tube.

[0163] 9. Follow steps #3 to #38 in Section A. discussed above.

[0164] C. Protomyxzoa Rhuematic PCR Detection Method

[0165] This method is used for reproducible detection of the Protomyxzoa Rhuematic genomic fragment. The steps are as follows:

[0166] 1. A master mix is formulated using the following reagents added in the following order in the listed volumes per 10 μL reaction using standard PCR techniques.

[0167] i. 3.484 of H2O

[0168] ii. 54 of Sigma Extract-N-Amp Enzyme Mix

[0169] iii. 0.264 of FL1953_F primer (5′-CCATGCATGTCTAAGTATA-3′)

[0170] iv. 0.264 of FL1953_R primer (5′-GTTATTATGATTCACCAAACAAG-3′)

[0171] 2. Once the master mix is thoroughly mixed and dispensed into individual PCR tubes 1 μL of the extracted DNA sample from either Section A. or Section B. above is added to each PCR tube with one negative control per 10 samples and minimally one positive control. Note: It is highly recommended that a separate set of PCRs accompany these samples using a pair of universal primers, such as 18S, to ensure that PCR inhibitors are not present in the sample.

[0172] 3. The resulting 10 μL volume is thoroughly mixed and placed in a validated PCR thermocycler using the following PCR reaction conditions:

[0173] i. 95° C. for 2 minutes

[0174] ii. 95° C. for 30 seconds

[0175] iii. 55° C. for 30 seconds

[0176] iv. 72° C. for 20 seconds

[0177] v. Repeat steps ii, iii, and iv 50 times

[0178] vi. 72° C. for 7 minutes

[0179] vii. Hold at 4° C., until sample is to be analyzed

[0180] 4. Resulting PCR products are visualized by gel electrophoresis on a 2% gel and stained with ethidium bromide. A positive result corresponds to a band that migrates at approximately 190 bp identically with the positive control band. Negative samples should be re-extracted by methods in Section A. or Section B. above and tested again by PCR to confirm the negative result.

[0181] The aspects/implementations outlined here, and many others, will become readily apparent to those of ordinary skill in the art from this disclosure. Those of ordinary skill in the art will readily understand the versatility with which this disclosure may be applied.

[0182] In places where the description above refers to particular implementations of compositions and methods for detecting protozoan pathogen Protomyxzoa Rhuematic, it should be readily apparent that a number of modifications may be made without departing from the spirit thereof and that these implementations may be alternatively applied. The accompanying CLAIMS are intended to cover such modifications as would fall within the true spirit and scope of the disclosure set forth in this document. The presently disclosed implementations are, therefore, to be considered in all respects as illustrative and not restrictive, the scope of the disclosure being indicated by the appended CLAIMS rather than the foregoing DESCRIPTION. All changes that come within the meaning of and range of equivalency of the CLAIMS are intended to be embraced therein.

[0183] For example, any recombinant products such as peptides and the like are within the scope of this disclosure, which could also be used as diagnostics for markers or in immunological testing as antigens.

The application's sequence listing, which the Patent Office published only in electronic form, follows.

SEQUENCE LISTING (8454 sequences)

SEQ ID NO: 1 - DNA, 430 bp, Protomyxzoa rheumatica
dccatgcatgtctaagtataagcacttatacagtgaaactgcgaatggctcattatatcagttatagtttatttgatagtccctactacttggataaccgtagtaattctagagctaatacatgcgctaactcctgacctcacggaaaggatgtatttattagatacaaccaaccttgtttggtgaatcataataactgagcgaaccgcatgcttcggcggcggtggttcattcaagtttctgacctatcagctttcgatggtagggtattggcctaccatggcgttaacgggtaacggagaattagggttcgattccggagagggagcctgagagatggctaccacatccaaggaaggcagcaggcgcgtaaattacccaatcctgacacagggaggtagtgacaagaaataacaatgcggagccttcg

SEQ ID NO: 2 - DNA, 249 bp, Protomyxzoa rheumatica
ccatgcatgtctaagtataagcacttatacagtgaaactgcgaatggctcattatatcagttatagtttatttgatagtccctactacttggataaccgtagtaattctagagctaatacatgcgctaactcctgacctcacggaaaggatgtatttattagatacaaccaaccttgtttggtgaatcataataactgagcgaaccgcatgcttcggcggcggtggttcattcaagtttctgacctatc

SEQ ID NO: 3 - DNA, 140 bp, Protomyxzoa rheumatica
tgcatgtctaagtataagcacttatacagtgaaactgcgaatggctcattatatcagttatagtttatttgatagtccctactacttggataaccgtagtaattctagagctaatacatgcgctaactcctgacctcacg

SEQ ID NO: 4 - DNA, 132 bp, Protomyxzoa rheumatica
  misc_feature (89)..(89): n is a, c, g, or t
tgcatgtctaagtataagcacttatacagtgaaactgcgaatggctcattatatcagttatagtttatttgatagtcccwactacttgnataaccgtagtaattctagagctaatacatgcgctaactcctg

SEQ ID NO: 5 - DNA, 150 bp, Protomyxzoa rheumatica
  misc_feature (5)..(5): n is a, c, g, or t
  misc_feature (136)..(136): n is a, c, g, or t
  misc_feature (138)..(138): n is a, c, g, or t
ttccntgcatgtctaagtataagcacttatacagtgaaactgcgaatggctcattatatcagttatagtttatttgatagtccctactacttggataaccgtagtaattctagagctaatacatgcgctaactccngncctcacggaaag

SEQ ID NO: 6 - DNA, 158 bp, Protomyxzoa rheumatica
accacacggcccctgaagcctaaaacatttgcagaaaacatgccaacctttgcaccggaaggtcagctccctatgggcagggatttttgtctgtctgcccacagctgtgcccccagcatttacaactctgtgtggcaagtaccaggggctcaaacaat

SEQ ID NO: 7 - DNA, 187 bp, Protomyxzoa rheumatica
gaaatggaatggagtagaatggaatggaatggaatggaagaaattggaatggtgtataatggagaggagtggaatggagtggagtggaatggagtagaatgcaatagaaaggaatggagtggaattgaatggaatgcaattgagtggaatggagtggagtggagtgcagtggaatggagtggaatgg

SEQ ID NO: 8 - DNA, 145 bp, Protomyxzoa rheumatica
cattcaattccattccattccattccataccattccattccattcgattgcattcctttctattccataccattcggttctattgccatcgattccattcctttcgatttctttcctttttagtctgttctattcgagtccattc

SEQ ID NO: 9 - DNA, 164 bp, Protomyxzoa rheumatica
acacggcttaatatccgtactccataatacaaattatttccgaatcaatgaaacgactaaagtgaccggcgttttgttcccgcagctagcatgctgagacacgttatcacgtatacttgtcactggataataatgtcgcccaatgacaacaatccctattggat

SEQ ID NO: 10 - DNA, 137 bp, Protomyxzoa rheumatica
gtgtatctgtgtgtgcatgtgtgtgtctgtgtgtgcatgtgcatgtatctgtgcatgtgcatgtatctgtgcatgtgtgtatctgtgtgcatgtgcacgtggtatctgggtgtgtgcatgtgtgtgcatgtgtgtgc

SEQ ID NO: 11 - DNA, 132 bp, Protomyxzoa rheumatica
tacattcactctggaaaacagtttgaaaatttttaaataaaatatcacatgacccagaaattacactcttgagcttatatctcagagaaatcagatgtatctttatacaagatctatacataaatattcata

SEQ ID NO: 12 - DNA, 313 bp, Protomyxzoa rheumatica
gaatcgaaaggaatggaatcgaatggaatggactggaatagaaaggaatggaatagaatggactcgactgtaatggattgcaatgtaattgaatcgaatggaatggattcgaatggaatgtaatcaaacgaaaaggaatgaaatgcaatgcaatggaatagaatggaatgcgatggaaaggaacggagtggaatcgagtggaatggaatcaaatggaatggaatcgattgggatggaatcgaatggaatggactggaacggaatgagctcgaatggaatggacaggaacaaaatagattcgaagggattggaa

SEQ ID NO: 13 - DNA, 248 bp, Protomyxzoa rheumatica
gaaaggagcagagtggaatggaatggaaggggatggaaaagaatggaatgaaattgatgggagtagagtggaatggtggggagaggagtggagtggtatggaattgaatggagtggagtggagaggagtggagtagagtggactggaatggaaaggaatggggtcgagtggagtggagtggagtgcagtagagtggaatggaaggtagtggaatggaattgaatggaatggaaaggaatggaatggaa

SEQ ID NO: 14 - DNA, 282 bp, Protomyxzoa rheumatica
ttccattctattccattccattccaaaccattacattcctttctagtccattccattccattccactccattttagtaaatttcatttcattaacttccattccattctagtccattctattccgttacatttcattccatttgagtccattcaattccattccattccattccaattgattccattccaatccgtaccattcgagtccactcttttcctcaccattccgtttgagtacgtttccttctattccattggaacccattgcattacattccatt

SEQ ID NO: 15 - DNA, 592 bp, Protomyxzoa rheumatica
aatggaatggaacggaatgcaacggaattgaatggaatggcgtggagtggaatggattagagtggagctgagtggagtggattgtagtgcagtggaatggaatggaatggaaaagagtggtgtgggatacagtggagtggaatggagtggagtagagtggagtggaatgaattggaatggaatggagtggagtggaatggaatggaatggaacggtatggaatggaatggaacgcaaaggtatggaaaggaatggaatggagtggagtggagtgcagtgaagtggagtgcaggggagtggaatggagtggaaaggagtggaatggaatggagtggagtggaatggaaagaaatggaatgtaacggaatataatggaacggaatggattggaacggaatggaacagagaggagtggagaagagtggagttgagtggagtggataggagtgcagtggaatggaatggaaaggaatggaaaggaatggaatggaatggaatgtagtgcagtgcagttgaattgagtggattggagtgcagtggaatggaatggagtggagtctagtggattggagtggaatggaatggagtggag

SEQ ID NO: 16 - DNA, 135 bp, Protomyxzoa rheumatica
accatcctcatcaccatcaccaccacagtgatcataatcagcatcattaccaccagcaccatcataatattatcattaccaggataaccaccaacacaatcatcatcatcatcatcatcatcgtcatcatcttca

SEQ ID NO: 17 - DNA, 189 bp, Protomyxzoa rheumatica
agcttatattcttgtgatgatgaggatgataagggtggtggtgatgatgatggtggagatggagatgatgatgatatgatggagatgactataaagatggtgatgctgctgatgatgttggtgatggtgacggtgattatggagatggtgatgaagatgatggtgataatggtgatgctggttataaca

SEQ ID NO: 18 - DNA, 122 bp, Protomyxzoa rheumatica
attccattccattccattccattcctttccaaaattcgagtccattccaatccattccattacactcgagtcatttccattccatttgcgtccattcaattccattccattcctttccattc

SEQ ID NO: 19 - DNA, 908 bp, Protomyxzoa rheumatica
tggaatggaatggaatggaatggaatgaaatggaatggaagggaatggaatggtatactacagaatggtatggagtggagtggaatggaatggaatggaatgcagtggaatggagtggaatggaatggaatggagtggattggagtggaattcaatggagtaaaatggattggattgtaatggagtggattagaatggaatggagagaagtggaaagaaaaggagtggaatggaatggtgtggattggagtggaatggagtgaaatggaatggaactgaacggaatgaaaaggagaggaatggaatggaaagctgtgtagtggaatggagtggtgtggaatggaattgaaaggagtggagtggattggaatggaatgaaacggtgtggaatggcaatgaatggggtgcaatggaatggaggggattagaatggagtctaatggaagggaaagtaatggagaggagtggaatggaatggaatggaatgcaatggaatcgagtgaagtggagtagagtggagtggaatgcaatggagtggaatgggatggagtggaatggagtggattagaatgcagtgaaatgaaagggaatggaatggaatgtagtgaagtggaatggaatgcaatgcaatggattcgattgaagtggagtggagtggagtggaatgcaatggagtggaatgagatggagtggagtggagtggaatagaatggaatggaattgaatggaaaggaattgactggaatgcaatgcaacgaaatggagtggaatgaagttgaatggaatgcaaaggaatggaattgaatggagtgatatggaatggaatgaaatggaatgcaatggattcgagtggagtgctgtggagtgtaatggaatggaatgcaatggaatggaatggaatggaaggg

SEQ ID NO: 20 - DNA, 204 bp, Protomyxzoa rheumatica
taaaagcataaaccttccactgcctcctcgaatcgaagcgatagcccggctagatgatctggaggagctagaggaagctttctacaaagaaaatcactatcgcccggagcttgtttcgcactgggatccaaagcaggaatacgcacaagaaattcagggctgggccgtcaatcgaccgcccatccggtccatcgttcagtacac

SEQ ID NO: 21 - DNA, 179 bp, Protomyxzoa rheumatica
tgcgatgtaactacttgcaccatagattggcaatgtaatccatactgcagagcgccccgggggcattgaaaagctcggaatgctgtaacgcccgcctgccctcttcattttatgaaagtgtgtattaatcgaaagcgtttttgccagagcctcaaccgcgaaataggatggaactagaa

SEQ ID NO: 22 - DNA, 149 bp, Protomyxzoa rheumatica
gagcagtattgagttccataaacttccgaccgcctttgtgagagtgggcgtttaaaacatttgctctaaaggctcccgtttgtggattaagggcgtgggcgccgtctgctcagcccccagggacctgacacgtttcagggcacgggagg

SEQ ID NO: 23 - DNA, 260 bp, Protomyxzoa rheumatica
ctcaactccacttcactccactccactccactccattccactccactcaattccttttcattccaatccagtgcattccactccattccagtaaattccaattcactccattccaatccactccactccattccattccactccattcctttccattccactcctgtccattctgttgcatttcattcgtttccattccaatccattcttcaccagtctattccattccattcgattccatggaattcctttccatttca

SEQ ID NO: 24 - DNA, 274 bp, Protomyxzoa rheumatica
ccattccattccactccattccattccattccattccactacattcccttccattccatttgacgccactctattccactgcattacattgcactccataccatgtcattccactctctttcattccattccactaaactccaatcaattgctttccaaacctttccactccattctacacctttcccttccattcctttccattccattcctttcaactccactccatttcaatccactccaatccactccacacctctccaatccattccac

SEQ ID NO: 25 - DNA, 154 bp, Protomyxzoa rheumatica
tggaatggaatggagtggagcggaatggagtggtgtggaatggaatggagaggaggggaatggagtggattggattataatgtagaaagaggaatggaattgaatggagcgaagtcaaataaattggagtggattgaagtggattgtaattgag

SEQ ID NO: 26 - DNA, 156 bp, Protomyxzoa rheumatica
agccactcagcagccaccaaaggccaccaaaaggggcagaccagtacgtctgtgacatgcattagcaaattcattagtgaaattaattctccccctaaacagctgagattgtgttaaacaaagccttgtagaatggttcgtggactccttttttct

SEQ ID NO: 27 - DNA, 161 bp, Protomyxzoa rheumatica
agggaggtggaataggataggggaggggaggaggcactgagcgacagtgaaatcaggacaggacgtggagaggatgaggtgtgtgggagagagcagaagggctttaattctgagacctgggattataaagccccaagaggggaggctgggaagtgccggcc

SEQ ID NO: 28 - DNA, 267 bp, Protomyxzoa rheumatica
cttgcagctttttgagtttcaatgttgttaagaaaaaatataattgttcccatgcgtttaacagaaaagcgaggcaagcaaagccaatgagtggagtcccgcggagggccgtcgggagccatttcgacggaaaaatatgatcgggatcatatgggctacacgcaaaaggtaaccagtttttctagaacttaggggcgccgccactcccaggagactgatttccccgcccgggcctaccggccaattttgggactcgcatatgtataa

SEQ ID NO: 29 - DNA, 151 bp, Protomyxzoa rheumatica
aaatcgaatggaatgtaatggtatggaatggactcgtatgtaatggaatggaatggaatcaaatgaacttaaatggaatggaatgcacacgaatgaaatggaatggaatggaatggatttaatagaatgcaatggcatggactagaaatca

SEQ ID NO: 30 - DNA, 163 bp, Protomyxzoa rheumatica
tctttctccttcgtttcttttctttcttcctttctttcttctttctctttcttttgttcttccttcattccttccttccgtttctttctttcttctttctttctttcctcttccttcattccttccttccttttctttctttctttctttctttctttctttc

SEQ ID NO: 31 - DNA, 233 bp, Protomyxzoa rheumatica
attccatttcattccgttccatttgtttccagtccttttgattcctttttgtcccaagtccattccattcgattccattccgtttgattccattcaatttgattccattccactcaattccactccgttcctttccactccattgcattccattctaatccattcctttggatttcattctagtccatttgattactgtccatttgataccattccattcgaatcaatcacat

SEQ ID NO: 32 - DNA, 219 bp, Protomyxzoa rheumatica
gaaatcaaatgcaatggaatcgaagggaatggaatcaaacggagtggaatcgaacggaatggaattgaatggaatcgaatcttatcaaatggaatgcattgaaggggagtgcagtggagtggaatgtagtggaatggaatggtgtggattggattcgaatggagtgtattggtgtgtactggaatggaatagaatggaatggaatggagtggaatggaa

SEQ ID NO: 33 - DNA, 127 bp, Protomyxzoa rheumatica
agatggaatggaatagaatggaatgcacttgaattgaatggattggaatggaattgtcgcgaatggaattgaatggaatggattggagtggaataaaatggaacggaatggaatgaaatggaatgga

SEQ ID NO: 34 - DNA, 216 bp, Protomyxzoa rheumatica
tagtggaaataaaggagtggaatggaacggagtagaatgtaatgaagtggagtgaaatggaatggagtgatatggagtggagtggagtggaatagagtggagtggaatttagtggagtggaatcgagtggagtggagtggaatggaggggagtagaaaggagtgaatttaaatggaatggtgtgtagtggagtataatggagtggaatggaatgga

SEQ ID NO: 35 - DNA, 244 bp, Protomyxzoa rheumatica
cattccattccattccactcccctccattccacatcactcgactatactccacaccactgcatgccattcctttatattccactccaatccactgcactctagtccactccattctactccactctactccataccattccactccaatccattccactccactccagtccactccactcctttccattccattccattccactcgattccactccattccactccactccactccattccaat

SEQ ID NO: 36 - DNA, 590 bp, Protomyxzoa rheumatica
attccattccattccattccattccattccattccccacgtgttgatttccatccattcagttcttttccgtctcattcctttcctttacattcatgttgtcgtcattccattccattatattccaatcaattccattccattcctttccagtagcgttgattcctttgcattccattccattccatgctttccactcgatttgactccaatgcattccattccattcctttcaattcctttccatttcattccaatcgtgttgactccaatccattccattccattccattccactcgcgttgattagattccatggaattccatttcactccatcccattcctttccattccattccactcgtgttgattagattccatggaattccatttcactgcattctattccattccattccagtcgggatgattccatttctttccattccattaaattctggttgagtccatttcattccattccattccattccattctattccattccgttccattccactcgggttgactcctttccattccattcctttccattctattccattccattccattccattccattcca

SEQ ID NO: 37 - DNA, 338 bp, Protomyxzoa rheumatica
ccggagtgtagtggcacaatctcagcacacatttcatttcaccattcctttccattctattccattccattcgattcaactccactccactccaatgcattccactcctctacattcccgtccattccattccactcctttccattccactcctttccactccactcccctccaatccactccattccattccactccattctattccttttcactcgactcctctccattccacagcactccactccacaccagtcctttccactccactacactccattcctttcccctccactctattccactccattccactccacttcactccactccattcc

SEQ ID NO: 38 - DNA, 138 bp, Protomyxzoa rheumatica
tccattcaatttcattccattgaaatcaattacgttgaaatccatttcattcttgttcattctattccaatccactccatttcagtgcattccattcgattccattccattcaaatccactccttacagtggcattcc

SEQ ID NO: 39 - DNA, 230 bp, Protomyxzoa rheumatica
cagtggagtggactgaaatggaatgaagtgggatggaatggagttgaatggagtggagtggagtggaaaggaatatggtggcatgcagaggaattcagattagttgaatggaatgcagtggagtggagtggaatggagtggaaggaaacggaatggaatggattggcgggcaatggatttgagtggaatggagtggagtggtatagagttgagtggaatggaatgcagtg

SEQ ID NO: 40 - DNA, 330 bp, Protomyxzoa rheumatica
atggaatggaatcgaatggaatggactggaatggaatggaaagaatggaatggaatagaatggaatggaatggaatggaaagtaatggactggaatggaatggactcgaatgaaattgactcgaatggaatggactccattggaatggactccaatggaatgcaatcgaatggaatgccagcgaatggaagggactggaatggaatggactcgaatggatttgaatggaatgtaatacaatggaatggagtagaggggaatggaatggaatgtattgcagtggaatggagtgcagtgcagaggaatggaatgggatggagtggaatgaaa

SEQ ID NO: 41 - DNA, 358 bp, Protomyxzoa rheumatica
ccagtccactacactccattccattccactactttccactccattccacaccattacactacattccactccattctactgcatttcactccactgcaatccactccattccactccattctacttcattccactccatgcttctccactccattccacttcaatccattccattccactacactcaattccacccaattcctctccaatccattctaatccattcctttaatttccactcaaccccacaacactccattccactccattccattccattccattgcattccactcaattccattccactccattccattccactccatttccttccattcctttccattccatttca

SEQ ID NO: 42 - DNA, 142 bp, Protomyxzoa rheumatica
tggaatggaatggaatggaatggaatggaatggattggactagaaaggaatgaaattgaaaagacccgaatggagtagactggaatggtatggaattgacctgaatggaatttattggaatggaatggaatggactcaaata

SEQ ID NO: 43 - DNA, 232 bp, Protomyxzoa rheumatica
tcagtttatatgtcttgcatatacattttgttaaatgtatccataagtatttcacatttttgaggttattttactctattgtttcttaactcattttcaaattgttcattactgttctatagaaatacagttaatttttatgaattaaccttttgtctttcatatttgttttatttactaataggcacagattttaaaaaatcaatctcaagacgttctacattgataatca

SEQ ID NO: 44 - DNA, 504 bp, Protomyxzoa rheumatica
atattttatgtaaatatgtaatataatatttataaccatataatatattatatataactatatattatgttatatatacttttataacataatttacataaaatatcataatataatatatattatattatttcatattacataatatatattacatatcacccaatataactaacatacataatattataatatagattatattgtgttatattaaatatcatatatatcatgtatcatatattctataatatatattacacattatataatatgtatgttgtctattatgtgatatatataactatatatataattatatttttatacatataactagataaacatgtaattctacatattttcatttataatatgtagaattatataatcatatataattatttatattctataaaaaattttatcattatataaattataatatataaaaattataatatgtactacaaatatatatattatatatcatatatgatatag

SEQ ID NO: 45 - DNA, 567 bp, Protomyxzoa rheumatica
agtcgaaggctttggcgcaccactggataaagtcattctgatagagcaacccgaaattcatttacaccctaagatgcaaggagaactcgccgatctatttattgacatctccaatgttaaggctgccaaggatgaggcagatgctaagagacggtatctggtaattgagacccacagcgaatactttctcagccgattaagacggcgcatctcggaaggcaaaatcagccactctgatttagctgtatattttgtcgaaagagcgaaagaacgcgccggctcgatcattcagggcgtacacatgcccccttcaggtgacttcgcttggcccgaagagttcttcgaggacgaccttgaagacactttagttgttctgagaaataaggccaaatctggtcagattcttggtggggaccattagatgccggtcttttctatctgttcgacattcattgcgaatgccggtaacgaacctttttttctcctgaatgtactctatcgttttgctcaagagaacccactccgcattgcgattgatagaccggcagctagagcaatttcgcttta

SEQ ID NO: 46 - DNA, 216 bp, Protomyxzoa rheumatica
ctccattccattccattttgttccattacactctactccactccattacactccactctattccactcctcttcattccacatgactcctttcctttccactcctttccattccacagcagtccattcctttcaaatttactccattccattccagtcctttatttcgactggatctcactcttttccgcatactggagtgcagtggcacagtctt

SEQ ID NO: 47 - DNA, 243 bp, Protomyxzoa rheumatica
ggagtggagtggaatggagtggaatggaatggagtttagtggaaaggaatgtaatcgaatggaacttaatggaatgaaacggaatggaagggaacagaaaggaatggagtggattggaatggagtgcagtggagtacagtggagtctatcagagtgcagtgaaatggaatgtaagggaatggagtggaatggagtggagtcgaatggaaattaatggagtggagtggagtggagtggagtgga

SEQ ID NO: 48 - DNA, 273 bp, Protomyxzoa rheumatica
ggaatggaacggagtggagtggaatggaatggaatggagttgaacaaagtggagtggagtggaatgaattggagtggagtggagtggaatggagtggaatggaatgcaatagaacggaatggaatggaaccgaatgaaatgaaatcgaatggaatggagaggaggggaatggagaggaatgcaatggggtggaatgaagcggagtgtagtggattggaaaggaatgtagtggaatagaatggtaagcagtggaatgtattgtaatggaatgta

SEQ ID NO: 49 - DNA, 317 bp, Protomyxzoa rheumatica
atggaatagaatggaatggattggaatggaatggaatggaatggaaggaatcgaatgattataatggaatggaatggattcaaggcacgtgaaatggaatagaatggaatggaatggaatggcatggattggaacggaatggaatggtatcaacccgagtggaatggaatgcaatgtaatggaatggaatcaacccgagtggaatagaatggaatggaccggaacggaatcaacccgagtggaatggaatggaatggaaaggaatcaacctgagaggaatggaatggaatggaaaggaatggaatggaatggaatgg

SEQ ID NO: 50 - DNA, 295 bp, Protomyxzoa rheumatica
gcatggaatggaatggaatggatttaaatggaatgcagttgatttgaacagaatggaatggaacggaatggaaaggaatgcaatggaatgaaatggaacacaatgcaagggaatgcaaaagaatggaaactaatgaaattgaatggaatggaatgcaatgcaatgcaatgccatgaaatgcaatgcaaataaatgaaatggactcggatggaatggaatggtctcaaatgaaaaggaatggaccagaatgaaatggaatggaaagaaatgaaatggacacgaatggaatggaccg

SEQ ID NO: 51 - DNA, 134 bp, Protomyxzoa rheumatica
tggtgtgtgttgtatgtggtttgatatgtcttgtgtggtttgtatacagtgtgtgtgtgtatatatggtgtgtgtgatgtgtcttgttcttttgtggtatgtgtatttcatatatatatgatgtgtgtgtattt

SEQ ID NO: 52 - DNA, 197 bp, Protomyxzoa rheumatica
ccactccattccattatattccattccattccactccattaaattccacaaccctccacactgttacattcttttccactgcgttccattccactcccttccattctactccactccactgcattcctctaaattccatttcaatccattgcattcctctgcactcctctgcattctgttccattccattcaactcc

SEQ ID NO: 53 - DNA, 324 bp, Protomyxzoa rheumatica
atggagtggagtggaatggaatggaatagaatgcagtggaatggagtggaatagaatgcaaaggactggagtggaatggaaaggattggagtggagcagaatggagtggagtagggtggagaggagtggaatcgagaggagtaaagtggaatggagtggagtggagtggagtgcactggattggaatggagtggattagagttgaatggaatggaatggagtataatggagtggagtggagtggagtggattggagtggaatggagttgattggattggagtggagtgaagaatgaaatggagtggaataaaatttaatggaac

SEQ ID NO: 54 - DNA, 2195 bp, Protomyxzoa rheumatica
cctcttagggggggggggaaaacctgtttgcggtttaccaagccgccccagcacgcacgccggatcgttgccctggcggggcgggttttggcccggtaccggactcgctacactcgttaacacacagatccttagatcttttgcccccgtgcagtatggagttggcgctccgcacgggggtttcccttttaagtcttcaaacactctacagaagggcagccctattgacctggatatccctcattcttgctgtcatcggtaccgcattatcgctcgtctccagttgttggatgtggttcaagatcaaacctgagcgctttgagcaacaagctgtgctgttccaaagatccaacgtccctgaactcataaaacagcaaaaaagcgctaccgcccttggcatcatcgggacgtctctactcctgctaagcaccgtcattgctttgctaggtgcgtcgtcctgagagcctccatcctggcgaacactgcgccagcgtcaagagcgcctacggcgtcgctacgcgatggactaccgtccactctggaccctggctccgcttatcgcctggcttccagctatcaggacaacgcaccctcgtgacctcgaaccagtttgcgctgtctctgctctacttcttcccgatgtcctggtaggtcagccaaaagacaaccagactagcgatgaccgcaattgcaacgccgatccacaatgctggttccatgttccgagttcctctcgcgtagcgacacaaaacctttctcatttataacccaccaaacccgttcacacgcgggcacgcaaaactgcgcccggactgtcgtcacacctcttgcacttcgcggcctagggtgcgacatctccggccacacgtggccggggtcggggatcaaacgccctcgtttatccggggatcggggtcggacagaccccgaaaatgttcttttaccggaacgggcctgctcccgaaaaagccatttagggtacctaaatgtatagcttgctccgccaggaacacctgacccgttctgacccgatttttcaaggtcagtcccaccctgggccaccgagtgcaagaggtgtgacgacagtccgggcgcttctatggcgtccgcgaagatccgtattcgggtctccagatacgaggacagctgtccgcatgtgcatctcggtgccacaggtgtgatctccagttgtcgtcattgatctacgcgttgatgtgtctatgggtttatgcgttggtgcgttgatgtgtctgtgggtttatgcgttggtgggtggttccaggggtagtggtttttggtaagccagttttttagtgctgtgggtccgtggttttcggcgtagtcgaggatgaagtgggatcggtgacggagttttttccaggtgtcgttgggaaggaccaggatcgtgtcgtcgactgttccggtttcggtggcggcgatggtttcgtcgtcttgctcgtcggtcaggccgaagtctttgcggaaatttttggaccaggacagggcacggtggccaggtgcggtacgtgtccattcagcccagatcgcagcgtcttgggcgtctccggtttcaacgaggtccgcagcgatttggaagggtgttcggttggcgccgcgggcttgtttttggccgccttgggttgcttctcgggcgagtcctggaaggtctgcgccgagtttggcgaggtagaggccgagttttccgaggtcagttccggcgatctgaacatcgacaccagggcctgcgagggcggtaaatccggtggtttcgatgcctgcattccagcggtcgaatatttgtgctccgaggtcttggccgtgctgttcggttcctttgtaggcgatgacggcgtggacgtggacgtgccagccgttggatccgtgggtgacttcgatggctttggcccaacctgcgatttgatagcgggcttggagacgtttccagggggctccggaggtcactcggtgccatcctgcgccgacggcgttccagactgattcgagtgtgtcgttgcggtcgtgtcggacggtcagggtgaccatcgcgatttggtgtccggcctgttgcgcgtttttgagaacgtgttgaagttcttcggcacgttgggctgcgatttttgctgcgcagacggggcagagccagatcgatccgcaggtttcgagtccggaaaatccggcgcggcggccgccggccg

SEQ ID NO: 55 - DNA, 255 bp, Protomyxzoa rheumatica
ctcctctccactccattccattccattccactccactccatcccattccattcaaatttactccattccattctattctattccattccattcctttccatttcactcctctccactccatttcactccactccactccaatccatttcattccgttctattcctttccattccattccgtgccatgccacattactccactccattccattgcactccacccaattccactccattcctctacattccattcca

SEQ ID NO: 56 - DNA, 175 bp, Protomyxzoa rheumatica
cattccattccattcgagtccattcctttccaaatcattcaagtgcattccattccgttccattcctttttattctgttccattcctttgtattcgagtccattccattccatttcattaaattcgattccagtccatttcattcctttccatttgagtccgtaccattccattc

SEQ ID NO: 57 - DNA, 159 bp, Protomyxzoa rheumatica
ctcaattccattccattccattccactccactccattccactcccctccactccactccactccattccattccattcctttgcactgcattccattagattgaattccattgcattccactcctctacattgcattcaattctacaacactccgttcc

SEQ ID NO: 58 - DNA, 147 bp, Protomyxzoa rheumatica
aaaagagtggatagtgttaagaagatgatcacacacaatttccatagccatttatagatagctagaagagctaaagaagattccttttttaactctgctggaaaaatctttttgtctctctctctaaatctaaatattatatactac

SEQ ID NO: 59 - DNA, 203 bp, Protomyxzoa rheumatica
tccgttccattcgattccattccattacactccattccattccattccaatgcaatccactccactccactccattcaattccactctattcagttccactccactataccctgttccattctattccactccaatccagtccattccattccactaaattctattccactccattccattctactccacaccgttcaattcc

SEQ ID NO: 60 - DNA, 122 bp, Protomyxzoa rheumatica
accaacacaatcactaccacagtcatcaccattactatcattaccatcatcaccccatcaggtgatggtgatgcctgatggcaatgatgataaagcttgatcaagcatatcaagtgtttttt

SEQ ID NO: 61 - DNA, 248 bp, Protomyxzoa rheumatica
atggccttgttcctacgccggttggtgtgagtgatttttttgcgcggccaatggcgtttctggaacagaccattgagaatctggctggcgaatgcagagctgcaattgcattggttttcttgaatggaggaaaggttcgttctccagtgcctatgcagatgctcacgcagccggcgcttgcctttggggtctcagaggccatggtgcgcgggcagcttgaggcgctgaatggcagccttttgaatctc

SEQ ID NO: 62 - DNA, 259 bp, Protomyxzoa rheumatica
cggccgatttagaacatcaagtcgcttccaaatgtccggacgcagcttaagcagcaactctatgaaaggacgattcgctctataggtaataaaatgagcgaggttgtgacttggaagattggcaatccgatcggaaaggagcccgtgcagactgtcaggcacaacgactgacgcacctttcagctgaattccagcacacacgacctcgtatgcaatgctttcaggctttgcaccacgaagatagatctcaattagctct

SEQ ID NO: 63 - DNA, 199 bp, Protomyxzoa rheumatica
tccattccactcgggttgattccattccattgcattccgttccattccattccgttccactcgggttgattcctttacattcctttccattccatttcattccattccattccattccgttcccttccattccaagagagttgattcccttccattcctttccaatccattccattccattccattccattccattcca

SEQ ID NO: 64 - DNA, 163 bp, Protomyxzoa rheumatica
caatcctctccacttcattcctttccactccagtcccttccagtccattccagtccactccataccactccaatccatttcattccaattcaatccactcctttccattccccttaaccccactccatttcactccactccactccattccattccactccac

SEQ ID NO: 65 - DNA, 501 bp, Protomyxzoa rheumatica
ggaatggaatggagtggagtggagttgaatggattggagtggcgtggaatggaatgcaatgaagcggagtggtgttgaatggagagcagtggagtgtagtggagtggaatggaatgcagtagagtggaaaggaatggagtggagttgaaaggatcggagtggagaggagtagaattgagtggagtgaagaggagtggactggagtttagtggcgtggagtcgcgtggaacagaatggaacggaaaggaatggaatggagtagaatggagtggaatggaatggaatggagttaaatggaatggagtggagagaagtggagtggagaggagtggaatggagtagagtggagtggaatggaatggggtggggtggaatgaagtggagtggaatggaatggaatgtaggagagaaatggaatggagtggagtggagtagaatggaatggagaggaattgagtggaatggagtgaaatggaatggagtggagtggaatggaatgga

SEQ ID NO: 66 - DNA, 441 bp, Protomyxzoa rheumatica
gagtggaatggaattgaatttaatggaaaggaatggaatggaatggaatggaatggcatggaatttaatgcagtggaatggaatggaatgcagtggagtggattggaatggaatggagtggaatggaatggagtgcattggaatggaatggaattgactggaattgagtggaggggaatggagtgcaatggagtgaggtggaaaggaatagaattcaatgcaatggaatggaatggtatggaacggaatggaaaggaacaggatggaatggaagggagtggtgtggagtggaatggaattgagtggagtggaatggaatggaatggaatggagtgtagtggagtggagtggggtcgagtggaattgaattgaaagtaatggaatgtaatataatggaatggaatggaatgaattagaaaggaatggaatagaatgcgatgg

SEQ ID NO: 67 - DNA, 142 bp, Protomyxzoa rheumatica
tgccgtcatctcaattcatgtctctgaagtttatgtccgcttgcgggagaggcatccgggcttctgaacgcggaatgctgttcgagtcatctgctgatctcgtcttcacgattgtcgggaagacgagatcagcagatgactc

SEQ ID NO: 68 - DNA, 460 bp, Protomyxzoa rheumatica
cctttccactccactccattcctttccactccattccactaaactccgcttcattccactccacaccacttgattccactgcacaccactccagtccacttaattctactccaatccaatccattccacaacactccattgcattccattccattccactccatttcattccattccaccccattccacttcactcctttccactccatccactccattccattcaacaccaattcagagctttccattccattccacgccattccattccactgctttccattctactacattccattcctctccaatccattccactcaactccactgcattccatcccattctattccattccattccattccactcctatgaatttcattacattcctctgcactccattccattctcctctactgaattcctttacacttaattccattccatttcaccccattc

SEQ ID NO: 69 - DNA, 684 bp, Protomyxzoa rheumatica
ggaatggaacggagtggagtggagtggaatggaggggagttgagtggagtgaaaccgagtgcagtggaatagaatggaatggaaaggaatggagtggagtgaagtagagtgcagtggagtggtggggagttgagtgcaatggtgtgaaatggaatggagtggagtggagtggaatgaaatggaatgtaacggaatggaatggaatgaaatgaaatgaaatggaatggaaaagaatggaacggagtggagtggagtggagaggagttgagtggagtggatcggagtgcagtggaatggaatggaatgcaactggatggaaaggaatggggtggagtggaatggaatggaagggagtagagtggaatagaatggaatggagtgaagtggaatggaatggagtggagtagaatggaatgcagtggaatggaatggaatggaagggaatggtgaaatgaaatgtgagctaaaattgtgccactgcactcctttctcggtgacagagggagattcatttgaaataaagggctggaatgcaatggagtagaatcggaaggaaaggagtggagtggaatggcatggagtggaatgaagtggagtggagtggaatggagtggagtggaatggagaggagtggaatggagagcaatggagtggaatggaatggaatggagtggaatggaatgg

SEQ ID NO: 70 - DNA, 229 bp, Protomyxzoa rheumatica
atggaatggaatggaatggagtggaatggagtggaatagaatggaaaggagtggagtggagtgcagtggagtggagtggagtaaagtgcagtggagtggagtggagtggaatggaatggaatggattagtgaaatgaaatgtaagctgagattctgccacagtactccagaaagggcgacagagtgacatcctgtcgaatgtaaggaaagtaattgagtggagtggaat

SEQ ID NO: 71 - DNA, 441 bp, Protomyxzoa rheumatica
tgaatggaatggaaaggaatggaatggaatgtggtggagtggaatggagaggactggaatagtgttgggtggaatggaatggagaggagtggaatggaatggagcagaatgacatggagaagagtggagtggattggtgtggaatggctaggaatggaatggaaagaagtggagtggagtggagtggagtggaatggtatgaaatgaagtgaaatggaacggaatggggtgcaatggatgggatacaatggattggaacgtatagaatggagtggaatggaatggattgcagtggagtggaatggattggagtggaatttagaagagtggaggggaatggaatggattggaatggaatgtatgggaatgcaatgctatggaatggagtaaagtggaatgcattggagttgaatggaaaggagtgaagtggaatggaatgga

SEQ ID NO: 72 - DNA, 742 bp, Protomyxzoa rheumatica
gattggagtgtaatggagtggaatggatttagtggagtggagagcagaggactgggcaagagtggattggagttgagtggaaaggaatagagtgtagcagaatggaattaaatggagggtaatagagtggagtgctattcaaaggagtggattggagtgcagttcaatggaatggagtggaatggaaaagaatgtaatggaacacaatggagtggagtggaatggaatagagtggaatgaattagagaggagtggaacagagtggagagcagtggaacagaatggaatatagtggaatggaatggtttggaatgaaatggagtgtattggaatggattagattgcaatggaggggaatggaatgacattgaatttaatggaatgcaatggaattgaaaagaaaggagtggaatggagtggaatggaatggaatggaatggaactgaatggaatggaattgaacggagtgtaatggattggagtggaatggaaaggagtggagcaaagtgtagtggaatggaatggaatgcaatagattggattggaatggaggggagtggaatggaatggagaggagtggagtggaatgtaaaaaaggaatggaatggagtggagtgtgatggattggagtcgagtggaatgtaatagaatggagtggtgtggagtggtttggagtggatttgaatgtagtgctgtggaatagaatggagtgcagagcagtttagtggaaatgaatggattc

SEQ ID NO: 73 - DNA, 146 bp, Protomyxzoa rheumatica
aagttgaatggaagagaaaggaatggattcaaaaggaatggaatggaatgcactccaaaggaatggaatggactcgactagaatggaatgtaatggtctcgaaaggaagagaatggaattgactcaaatggaatggagcggaaagg

SEQ ID NO: 74 - DNA, 181 bp, Protomyxzoa rheumatica
aatggagaggaatggaattaaaggatatggaatggaatggaaaggactggaatggaatggaatctagtggaatgcagtggaaaggaatgtaatggcagtgaatggaataaattggaatggagtggaatggaatggaatgcaggggaatggaatggaatggaatggaatggagtggaatgga

SEQ ID NO: 75 - DNA, 140 bp, Protomyxzoa rheumatica
tatccactccattccattgaattgtattccattccattcctttccatttgattccacttccttccactccactccattccattcttctctactggacccgaacccactcgattcctttccattctgttacattctattcc

SEQ ID NO: 76 - DNA, 163 bp, Protomyxzoa rheumatica
aatggaatgtagtggagtggattggaattgaaaggaaaggagtggactggaatagaatggcgtggagtagaatggaatggaaaggaatgcaatggcaaggaatggaatggaatggactggagcacagtgaaatagagtagacaggaatggcatggagtggaat

SEQ ID NO: 77 - DNA, 424 bp, Protomyxzoa rheumatica
tgaacgaaactgaatggaatggaatggaaagaaattcaatgaaatgcgatggacttgattggaatggaaccgaacggaattgaattgaacagaatggaattgaatggaattgataggaatataatggaatggagtgtaatggaaagaaatcgaatggaatggaaaggaatggaatggacaagaatggaatggactcgaacggaattgactgaagtggaatgcactcgaatggaatagaatggaatggaatggcatagaatggaatggagtgaaatggaatggaatagaaaggaatggaatggaatggaatcgggtggaacggaatcgaaaggaatggagtcaaatggaatacaatcgaatggaatgacatcgaacgtactggaatggaatggactaaaatggaattgtctcgaatggaaagaag

SEQ ID NO: 78 - DNA, 356 bp, Protomyxzoa rheumatica
tggagtggagtgtggtggaatggaatggaacagaatggaaaggaatggaaaggaattgaatggtgaaacgaaatgtcagctaagattatgccactgaactcctatatgggtgacagagtgagatgcagtcaaaataaaggaatggaatggaatggagtagaatggaattgaatgtaatggagtggaatggaatggagtggaatggagtggattggattggaaaggagtggagtgtaatggagtggaatggaatggagtggaatggagaggaatggaatggagtggaatggaatagagtggaatggagtgtattggagtggagtgtaatcgagtggagtggaatggagtggaatgga

SEQ ID NO: 79 - DNA, 149 bp, Protomyxzoa rheumatica
catggaatggactcgatggaatggaatggcataaaatggaatgaaatgtactcgaatggaatgcagttcaattgaatgtacacaaaaggaatggaatggaatggaatggacggactcaaatgaaatggaatggacccgaaaggaatgga

SEQ ID NO: 80 - DNA, 149 bp, Protomyxzoa rheumatica
ccattccattccattcatttccattcctttcccgtcttttcccttcccttctattccattcaattctactacactcccttccattccacgtgactccaatgcattccaatccattccactccattccactatgttccattccatttcat

SEQ ID NO: 81 - DNA, 172 bp, Protomyxzoa rheumatica
tccattccattccattccattccattccattccattccatacttttccactctggttgattgcataccattccattccattccgttccattccattcctttccatactattccactctggttaattccatatcattcctttccattccattccaatccattccattccattc

SEQ ID NO: 82 - DNA, 257 bp, Protomyxzoa rheumatica
gaatggaatggaatggaaaggaatataatggagtggcgaggaatggagtggagtagagaggaatggaatggaagggaatggaatgaagtgcaggggaaaggaatggaatggaataaactggaatggaaaggagaggagggtataggagtgtaatggaacggagtggaatgtatttgagtggagtggattggaattgagtgtagcggaaaagaataggtaggagtggaatgaaaagagtggaatggaatgcaatgaaa

SEQ ID NO: 83 - DNA, 186 bp, Protomyxzoa rheumatica
ccattctatttcaatccattcccctccaatccattcccatccattccactggactccaaaccaatccattccactccaatctgctccactccactccactccattccattccattgcattccactcctttccattgcactctacttcattccattccacgcgactccattccactccaatccactc

SEQ ID NO: 84 - DNA, 243 bp, Protomyxzoa rheumatica
ttccattccactccattcccctccactccatttcatgccattcccttccactacattccattccataccattcctgtccattccattccactccgccccactcgattccattccactttattccattccattccatttctttccattccattccgttccactccactgcatgccattctcttccattccattcccctcctctccgttccgttccattccactccattgcattccattcccatc

SEQ ID NO: 85 - DNA, 496 bp, Protomyxzoa rheumatica
ccgttcgattagattccatttggggccgttctattatactccattccattacagtccattccattccattccattccagtccattccattgcattccactcatttccattccattccattcaattccaattcattccagtccattccattccagtctgttccattcctttcctttccattccattcctttcaaatccattccattcaattccattccattccattccataccattcgattccatgccattccagtccattccttttgagtccagtccattccattcctttcaaatctattccattccattccattccgttccattccatgctattagattccattccgttccattgtgttacattcatttctattccattccatttgaatccattccattctattccattccattccatttgaatctattccattctattcctttccattcccttcccttccattctattccattccatttgatttgattcgattc

SEQ ID NO: 86 - DNA, 521 bp, Protomyxzoa rheumatica
ggaatggaatggaatgaaacagagtggaatggaatggaattgaatggagaggaatgtagaggagtgaagtggaatggaatggaatgtattgaaatgtaatggaatggagatgaatgtgatgtagtgcaatgtaatggaatagaatgggatggaatagagtagcatggagtggaatgaaacggaatggaagcgtatggaatggaatttaattgaatggaatgcaatggaaccgaatggaatgctgtggaatggaatggaatgtgctggaaatgaatggagtggaatgttatatggtggagtggagtggaatggaatggactggattggagtggaatggaatggaatggaatgtaaaggaggggaaacaactggaatggtatggaatggaatgtaatggaatggagtgaagtggaagggaatggaatggaagcgaacagagtggaatgtaatggaatggagtggagaggaatggagtggagtggaatggaatggaatggaatgggtaggaatggagccgagtg

SEQ ID NO: 87 - DNA, 136 bp, Protomyxzoa rheumatica
tgagtgaaatggagtagagtggaatggagaagagaggaatggaatgaagcagaatagaacaaaacggaatagaacagaaagaaatagaaaggagtggagtgcagtggagtggagttgagtagagtggatctgattg

SEQ ID NO: 88 - DNA, 139 bp, Protomyxzoa rheumatica
gtgtcgcaagcaccctgtagccagagcctagacatgtgttacatcagcagtttgatcagtgaagtgacatgtcacaatgtccttgtagccatatccttgacaaaagtcacaacacctgggtcatcagtgcggagatatg

SEQ ID NO: 89 - DNA, 125 bp, Protomyxzoa rheumatica
gtggaatggagtggaatggagtggaatatagtggaatggaatggattgtagtggaatggagtggagtggaatgaaacggaagggaagggaatgcaagggtggggaaaggaatggaatagaatgga

SEQ ID NO: 90 - DNA, 304 bp, Protomyxzoa rheumatica
ttcctctacattccattccattccattcaaatccattccattctgatcattccactcctttcctatccattccatttcattccattccattgaatttcattccattccactccactccattccattccatttcactcgacccaactcctctccagtccactccattccattccatgacttccactccactcaattccattcaacaccactccactccattacattccgttccattcctttcctttccattcgactatattctattccaatccactgcactccactaccttccactccattccaa

SEQ ID NO: 91 - DNA, 122 bp, Protomyxzoa rheumatica
tttgaagatggactacaatccctttcatattttgtataaaaaggaaatataattacttgtaaatgaagcatagatatatattgaatacaaaatcttctcatataaatctgttttaccctcaa

SEQ ID NO: 92 - DNA, 127 bp, Protomyxzoa rheumatica
ggaatggaatggaatggagtggaatggagtggaatagaatcaaaacgagttgaacggaatggaatggattggaactgaatgcaatggaatggaaagaatgaaacagaatggaattgaatctaccgga

SEQ ID NO: 93 - DNA, 175 bp, Protomyxzoa rheumatica
atggtactgaatggaatcgaatgcaatgtaatcgaaagaaatgtaatcaaatagattggaattgtatggcatcgaatggaatccaatggaatgtggtgaagtggagtggagtggagtggaatccagtggaatggaatgcgttggaagggaatggagtggtgtgaagtggagtgga

SEQ ID NO: 94 - DNA, 672 bp, Protomyxzoa rheumatica
gaatggagtggaatggaatggagtggagtggagtggagtgcaactgattggagtggagtggagtagaatggaatgtagaggagtggaatggaatggaatggaatggaaagtagtgaactggcatggcatggactgaagaatggaataggatgggatgtaatggaatggagtggagaggaatgcaaaggagtgaactggaatggaatggactgaagtggaatggaataggatgggatgtaacggaatgaagtagagaggaatagaatggagtgaagtggaatggattcaaatagactagaaagaagtgggatggagttgagtggaatggaatggagtggaatggagttgggtggagtggaatgaagtggagtggagtggaatgtactggaatggaatggagaatagtggagtggaatggagtggaatttagtggagttgagtggaacgtactggaatggattgcagtggaatggagaggaatggaatggaacgtagtggaatggaatggagtggagtggaatggaatggattggataggaaaggaatggatggaatggagtgcaatggaatggaatggagtggagtggaaaggaatggaattgaggggaatggaatgcagtgtaataaagtgcaatggaatgcagtggagtggaataaaatggagtggagtgg

SEQ ID NO: 95 - DNA, 254 bp, Protomyxzoa rheumatica
gaatggaatggaatggaatggagtggaatggaatggaacgcaaatcagtggaatggaatggagtggagaggagtggagtggagtgaagagaaatggagttgaatggagtggaacggagtggaatggagtgaaatggaatggaatggagtggaatggagtggaatggaatgatgtgaaatggaatggtattcagtggattggaatgcaatggagtggaatggaatggagtggaacggaatggaatggaatgtaat

SEQ ID NO: 96 - DNA, 182 bp, Protomyxzoa rheumatica
ccttccctctttccttccttcattccttccctctttccttttcttccttccctccttacttccctctctccttccttccttccctccctccctccttccttccttccctctcttccttctttccttccttcctgccctcctttcctctcttccttccttcattccttccttccctctctcct

SEQ ID NO: 97 - DNA, 230 bp, Protomyxzoa rheumatica
tccttaatttcctcatctgtaaagtgggcttggaatacttgccttgaaggattgagtcttgcctatgaccattgagatgagagcatggggaccaacatctaactcaatatatgctgttgctattgttaaaactaagaacttggtatacagttggagctcaataggctattttctttcatttacttagcaaacatttgctgagtacccagaggaatcagagtctgtgacag

SEQ ID NO: 98 - DNA, 156 bp, Protomyxzoa rheumatica
aggaaaaaaaaaaacatttcttaccttttatagttttcttctctcccttctgttatgttttgactagaggaacacttaacaagatggctttcactagacgtaattttttgtgtatctccacatcatgtaatgtgagtcctctttccttctttcaac

SEQ ID NO: 99 - DNA, 341 bp, Protomyxzoa rheumatica
ccattccatttctttccattccattcctttccattccattatactcgtgttgattccttcccattccattccattccatttcattccattccactcgtgttgattccattctgttccattccattccattccactcgcatggatttcattccattcctttccattccattcctttccattccataccattcctttccattccgttccattcaattccattccattccactcgtgttgataccaattcattccattctattcctatccattccactcctgttgattccaatccattccatgccattccattccattccattctattccattccattccattc

SEQ ID NO: 100 - DNA, 130 bp, Protomyxzoa rheumatica
caatccattccattccattccattacactcgaattgatagaattccattttattccattcctttccatttcattcctctccattcccttacattccgttccactcaggtagattccatttcattccattc

SEQ ID NO: 101 - DNA, 219 bp, Protomyxzoa rheumatica
tggagtggaaacgaatagaatggaatggcatggaatcaaatggaagggaatcgattggattggattggggtccagtggaatggaatgaaatggagtggagtgaaatggaatggaattcaatggaatggaatggcatggaatggattggaatggaagagaatggaatggagtggaaaggaatggaacggaatggagtggagtggaatggaatgaaatgga

SEQ ID NO: 102 - DNA, 158 bp, Protomyxzoa rheumatica
aatggaatggaatggagtggaatggaatgtaatgtaatggaatggaatgggatagaatcaacacgaatggaatggaacggaatggaatggaatgggatggaatggaatcaatctgagtgctgggggatggaatggaatggaatgcaatggaatggaat

SEQ ID NO: 103 - DNA, 243 bp, Protomyxzoa rheumatica
ttccattctattccttttgattccgttcaattccattccattcgattacaatccattcggttcctttccattcaactccattccatttgagtccattctattccatttcattccgttctgttcgataccaatccgttcgattccattttgttcgactccattgcattcgaatcaattctattccattccattccattcgatttcattcgattgtattccattccattccattccatttcactc

SEQ ID NO: 104 - DNA, 560 bp, Protomyxzoa rheumatica
ctccagtccattccactccactccatcccattccactcctctccattccattccattccactcaactctaatccattaaactccactccccgccattccacatcactccactcctctccactccattccactccactccactccactcaatcccattatactcctttctctcgacaggatctccctctatcacacaggcagtagcttagtggcgtgattacagcacacatttcattccgttccattccattctgttccgttccattcctttccactccactgcactcccctccactatattccattacatccgattccattccactccatttggctccactccacttcactgcacttcattccactccattccactccattcctttccactccaccccactcaactccactccattccattccgttgcattccatttcactgcactccactcaattccactccacaccaatctactttattacattccatttcattccactctactccacttcacacctctccattccattccactccactccattccattccagttcat

SEQ ID NO: 105 - DNA, 151 bp, Protomyxzoa rheumatica
tattccactccattccactgcactcatctccagttcattgcattcttttggattccatttgatgacatttgattgaattcatttcaattccattcccctcaataccattacattcaatcccatccccttcaattccattgcattcgattcc

SEQ ID NO: 106 - DNA, 467 bp, Protomyxzoa rheumatica
ctccattccactccactcttgtgcactccactccactacattgcattcgactcccctccactcccctccactctgttgcattccattccattccactacaatccattccctaccgctccacgccattccactgcactccactctaatccattccactccagtccactccattccactccactccattccactctattcaattccattccattccactccattctattcctttctcctccattccattctactacattccattccactccactccattccattgcattccattccattccactgctctccattccattccccacaaatcttctccattctactccattccattccatttcaccctattccattcctctccactgcactccattccactcccctatactctactccacttcactccactctgtcccagtccattgccctccattccactccattccact

SEQ ID NO: 107 - DNA, 201 bp, Protomyxzoa rheumatica
aacgaatagaatcatcatcgaatgaaatcgaatggaatcatcgaatggactcgaatgtaatcgtcatcgaatggaatcaaatgcaatcattgaatagactcgtatgaaatcatcatcgaatggaatagaatggaatcctcaaatggaatcgaatggaattctcgaatggcattgaatggaatcattatccaatggaatcat

SEQ ID NO: 108 - DNA, 123 bp, Protomyxzoa rheumatica
accacttatctcaattccactccactcctttgcattccattccattgaactcctttgcattccattccactccattaataaccattccactccattccacatcgttccattcctttcccttgc

SEQ ID NO: 109 - DNA, 134 bp, Protomyxzoa rheumatica
tctctgtgtgttgtgtacattgcctgcatgtgtggtgtgtgtgtgttatgtgttttttccatgtattgtgtgtctggtgtgtgtttgtgtgtgtaatgtgtgtataatggatgttgtcagtgtgtgagatgtgt

SEQ ID NO: 110 - DNA, 132 bp, Protomyxzoa rheumatica
cacagacaatacacatcacacacacaatacacagacaacacacacaacacacagaaaccacatacatcacacaatacacacacttcatacaaacacaatacacagacaatacacatcacacataacacacag

SEQ ID NO: 111 - DNA, 147 bp, Protomyxzoa rheumatica
actcaaatccatctcactccactccactccactccacaccactccactccattccattgcactccattccattctattccactccagtccactgcaatacgctccactccattgcactcccctccactaaattccactccattccat

SEQ ID NO: 112 - DNA, 380 bp, Protomyxzoa rheumatica
tccattccattccattccattccatatcagtgtactcaattccattccactccacttcactcctttccattcaattacatttcgttccatttcattccactccattccattcagctccactatattccattccaatccacttcactccactacattcctctcgtttccattccacttcactcccctccactccattgcatttcattccatttctctcctccaatccattccactccactccattgtattccatttctttccatgccattcgagtacattccattcaacttcactccactctagtccattccattccactccattcctttgcattcctctgttttccattccactacgttccattccattgcattccattc

SEQ ID NO: 113 - DNA, 138 bp, Protomyxzoa rheumatica
cccccagaacccaaaaacccaaagactttgatttcttggaagctgcccagtggttcatggaaataacactgccacattgccagtcggcatcttttatggtcgaaactacgatggtatctgatcgtcttcgaacctccg

SEQ ID NO: 114 - DNA, 237 bp, Protomyxzoa rheumatica
cagccaccgcagagatcatgtagatcaccaacaagggcaacaaaggcaaccagttccaggacaggaagttcaagcccatatcggcgaactgaccggtggtttgagtcatcacaatgtcagtcatgttcaggctgcccgccaccagcaatacagtgaccagcacaaaaccaatcgccaattcataggacaccatttgcgcagaagcacgcatggcggccaggaaggcgtacttggagt

SEQ ID NO: 115 - DNA, 273 bp, Protomyxzoa rheumatica
gagtggagtggagtggaatggagtggagtggaatggagtgcagcggagtggaaaggaatggagaggagtggagttgagtgcagtgaaaaggagtggagtggagtggagttgagtgcagtgaaacgtagtggaatggagtggaatggactggagtggattgcaatggactggagtggaatagaatggattggagtgcaatgcaatggaatggagaaaaatggagtggagtggattgaagtggagtggaatggagtggagtggaatagagtggaa

SEQ ID NO: 116 - DNA, 251 bp, Protomyxzoa rheumatica
cccctccacgccactcctctccactcctctctgttcaattccattacttccctttccattccattccattccttccactccactccactctattcaactccattccacctcattccatttcactccactccactccactacacatcattccattcgaatccgttcaatgccattcggttccaatccactcgcttacattccattcgaatccattccttttgactccattctgtaagattccatttcattcg

SEQ ID NO: 117 - DNA, 133 bp, Protomyxzoa rheumatica
atgggatgtaatggaatggaattgaatggaatgcactggaatgaaatggacttgaatggaatggactggagaaaactggaattgaatggattggagttgaacggaacggaaagaatggaatggaacggaatgg

SEQ ID NO: 118 - DNA, 217 bp, Protomyxzoa rheumatica
ttccattccattccattccattccattctattccattcgactccattccattccatttccttccatccatttccatcccattctattcttttccattctattcctttccattccattcgtttccattcctttcgagtccattccattccattccagtcaataccattccattcgacgctattccattcgactccattccattccattccattccatc

SEQ ID NO: 119 - DNA, 161 bp, Protomyxzoa rheumatica
ttgaatcaattacattgctctccattacatgcgagtcttttctattccagtattttccatttaattccattccattcgattccaattcgttcgacgccattttgttccattcgattccagtccattccatacgactacattccattcgatttcattccatt

SEQ ID NO: 120 - DNA, 172 bp, Protomyxzoa rheumatica
cattccgttccattcctctccattccattccattccaatccatttcttttcactccactccacttcaatccactccattccattaaattcctctccattctcttccattccgatcccttccgtttcactctactccactcctttcctctccactaaattctattccattcca

SEQ ID NO: 121 - DNA, 285 bp, Protomyxzoa rheumatica
tccattcctatccattccattccattccattccattcaagtccattccattgcattccattccattcgattcctgtgtattccattccattcaagtccgttccattgcattccattcctttcctttcggatcaattcaattccattccattacattcttgtcctttctacttgagtccattccattgcattccattccattcaaatccatactattctattccattcgagtctattccattcaattccgttcaagtccattccattctattccattagagtgcct

SEQ ID NO: 122 - DNA, 218 bp, Protomyxzoa rheumatica
gaatggaatggaaaggaatggtatggaatggaatggaatgatacggactggaatggaatggattggaataaaatatacatgaatggaaaaaaggtatggaatggaatggacccaaatggaatggaatggacacgaatgaaatgaaatagaatagaatggactcaaatggaatacaatggaatttaatagaatgaacactaatgtaaaggaatggaagg

SEQ ID NO: 123 - DNA, 155 bp, Protomyxzoa rheumatica
ccccacacacagatacacaaccacgtgcatcacacaaccacacacaccacacacaaccacacacgaaacacatcatatacatcacacatcacacacatcacacaattgcatacacaccacacaccatacacaacacacacatcacataatcacac

SEQ ID NO: 124 - DNA, 123 bp, Protomyxzoa rheumatica
cggattgaatgcaatggaattctctcgaaaggaaataaatggaatacactcaaaaagaatggaatggaacaaaattgacacgaatggaatgaaatggacttgaatgaatcgcaaaagaatgga

SEQ ID NO: 125 - DNA, 174 bp, Protomyxzoa rheumatica
ctattctactccactccattccaccctaatacactccattccaatctcttcacttccactccactccattccattcgatttttctccattccatttaattctttatttcgactggaactcactttcttatccagactggagtacagtggcacattgttagctcacattacactt

SEQ ID NO: 126 - DNA, 261 bp, Protomyxzoa rheumatica
tggagtgtaggggagtggaacggagtggtgtggaatggaggggaatggaggggaatggaatggaatggagtggactggaaaggaatggattggaatggaatggagtaaagtgtattggagaggagtcgagtaaaatggagtggaatggagggaaatggagtggagtgatatggaggggagaggaatggaatggagtggaatggaatgaaacagaatggaacggaatggaacggagtggagtggagtggaatggaggggagt

SEQ ID NO: 127 - DNA, 205 bp, Protomyxzoa rheumatica
acactgcacacgtacctacaacagcacacacatagagcaaacacatacctcacatacaaacaccacaccacacacattctacaaacacatcaagcacacatcaatcactacacacactgcacacacacaacaccatacacatagaaaacacacacatcacatacaccacacacacatatcacatgcacaccacatcacacatagt

SEQ ID NO: 128 - DNA, 268 bp, Protomyxzoa rheumatica
attccattcccttccattccattccattccattccattccgttcaaatccactccattctattccactccagtccattccacgccacacatatcaactccattagattccaatccactctactaaactccaccccattccatttcactccattccattctattctactccactccactgcattccacgccactccattacactccactgcatacgactccaatccattccattccatcgcataacattccactcaactacattccatt

SEQ ID NO: 129 - DNA, 248 bp, Protomyxzoa rheumatica
gaatggaatggagtggaatggagtggaaagtagttgtgtggagtggaatgtaatggagcagagtggaatggaatgtagcggagtggaatggaatggaatggaatggagtgaaatggactggaactgaatggagtgtaatggagagaagtggagtagagtggtgtgtagtgtaggagaatgcaatggaatggaaaggaagggaatggaatgggctgaaatggaacggaatgtaatggaatggaatggag

SEQ ID NO: 130 - DNA, 378 bp, Protomyxzoa rheumatica
agcagaatggaatggagtgtattggatggaatggagtggactggagtggagtggaacgtaatggaatggaacagagtggattggagtggacagcaatggaatggaggggtgtggaattgaatggaatggaatggaatttagtggagtggaatagaatgtaatgaaaaggaatggaatggaatggagtggactggtgtgcagtggatttgtgtggagttgagtggagtggagtgtaatggagggaagtgtaatagaacggaatggagtggaatggaatgaaaaggaattgaatggaacggattcgagtggaatggtggggagtggaatggagaggagtagaatggattggagtggaatggagtggagtggaatggagtg

SEQ ID NO: 131 - DNA, 217 bp, Protomyxzoa rheumatica
ccattccattccattcgagtacattccattccattccattccaatcgaatccattccattctattccatatgagtccattccattccataacattagattcaattccattagtttccattcatttgtattccattccattcaagtccacgccatttcattcaattccatttccttcgagccaatgccattgcattccattccattccattcccttcc

SEQ ID NO: 132 - DNA, 629 bp, Protomyxzoa rheumatica
ggaaaggaatggagcagaatttaatggaatggaatgcaatggaatggaaacgaatggaatggaatggggtggaatagagtggtgtggaatttaatggagtgaagttgaatggaatggaatggaaaggattggaatgcagtggagtggaatggattggaatagaatggaatagagtggaatggaatctagtgtaatggaatggaagggaatgaaatgaaatgcagtcgaatgtaatagaatagaacggaagtgaatggagtggagtgaaaagtattgaattttttcaagtggaatggaatggaatggaatgtaaaggaatggaatgcattggaaatgaatggaaaggaatggagtggaagtgtagtatactggagtggagtggagtgaaatggaagagaatagaatggaaaggaacggaatggaacagaatggattggaatggaatggaatggaatggaatagactgtattggaatgtaatgtaatgttatgtaatggaaaggaatggaatagagtggaacggaatggaattgaatggagtggaatgtagaggagtggagtgtaatggaatggaatgttgtggaagggattttagaggaatggagtggagtggaatggaatggagtggaa

SEQ ID NO: 133 - DNA, 135 bp, Protomyxzoa rheumatica
aatggaatggaatgaaatcaacccgaatggaacggattggaatagagatgaatggaatggaagggcctggaatgcaatggaatcaaatagaatggaatggaaaggaatggaatggagaggaatggaatggaatgg

SEQ ID NO: 134 - DNA, 323 bp, Protomyxzoa rheumatica
ccattccattccattccattccattccattccattccattgtatcccactccatttcattccattccactccactccactgaattccagtccatttcattccatgccattccaatgcatgccattgctttgcattccattctgttccgttccattccattccacttcactccattccaatacaaccccctcttctcctttccattgcaatccattccactccattgctttacattccattgcattccattccaatccactccactccattccattccaccccgtccattccattccattaaattccattccattccattccat

SEQ ID NO: 135 - DNA, 432 bp, Protomyxzoa rheumatica
aatgcaatgtaaaggcatggaatggcacagaacggaacggaattgaaaggaatagaatctaatggaatggaatggaattgattccaatggaatggactggaatggaatagaatggaagggaatttattcacatggaatgggctggaatggaattgagtggaatggaatggactacaagggaaagaacatgaatggaatggaattcaatagaatggaatcgaatggaatggaagggtatggaatgaaatataatgcagtcgaatggaatggaatggattggaaaggaacggaatggaatggaatagaatcgaatggaatggaatcaactggaatgcagtgcaatgaaatggaatgttttggaatggaatggaggggaatggagtggagtggagaagagtggaatggaatggaatggaatggaatggaatggaa

SEQ ID NO: 136 - DNA, 181 bp, Protomyxzoa rheumatica
agtccattccattccattctcttcgattccattccattccattagagtccattccattccattccattccttttgagtccattcaattccaatccattacagtccctcccattccattctattccttttgagtctattccattccattcaattccattcaagtcaattccattccaatcct

SEQ ID NO: 137 - DNA, 171 bp, Protomyxzoa rheumatica
caatcttagcacacatttcatttcaccattccattccattacactccactcaattacattccattccactacactccactacactctacttccctccactccatgccactccactccattccactcgactcctttccattccattccattcaattccattctattccattc

SEQ ID NO: 138 - DNA, 154 bp, Protomyxzoa rheumatica
agtggaatggaatggaatggaatggaaggaatccaatggaatctcatggaatcgcatggaaacgtatccaatcaaattgaatcaaattgaatgaatcgaatgtaatcgaatttaatctaatggaaaagaatggacaaaatgggatcaaatggaa

SEQ ID NO: 139 - DNA, 161 bp, Protomyxzoa rheumatica
cgttggaaacgggaatgtcatcatataaaatctagacagattcattctctgaaacttctttatgatggttgcattcgagtcacagggttgaacattccctttcacagagccggtacaaaaccctctttttgtagaatctggagcgctttgcatcctgcggt

SEQ ID NO: 140 - DNA, 150 bp, Protomyxzoa rheumatica
cagacacattgtcacacagatacacaaacacactgtcacatggagacatcaccacacagatatatgaacacttcaccacatggacatagcaccacacagacactctgccccacggacacaccaccacacagaaatgcggacacactgcca

SEQ ID NO: 141 - DNA, 144 bp, Protomyxzoa rheumatica
tttcattccaatcatttcgagtccatcccatttcattgaattcgaatctattccatttcattccaatcatttcgagtccattccattccattccattccactgtagacagttcctttcctttccattccattcctttcgattcg

SEQ ID NO: 142 - DNA, 236 bp, Protomyxzoa rheumatica
ggaatggactcgaatggaatggtgtcaaatggaatggaatcgattgcagtggaatcgaaacgaatggaattgaatggaatcgaaaggaatagaatggaatgatgtgtaatggaaaaatatcgaatagaatggaatggaatggactcgaaagaaatggaatgattaggaatggactcggatggaatggactggaggggaatggaatcaaatacaaaggaagtgaatggaatggaatg

SEQ ID NO: 143 - DNA, 172 bp, Protomyxzoa rheumatica
tatttaagtccattccattcaagtccattacatttgggtccattccattccattacatttcctgtgattccagtccgttcaattccattttttttcaagtacattcaattcgagttcattccattcctgtgcattagatgcccttccaatcgattctattccatttgactcc

SEQ ID NO: 144 - DNA, 130 bp, Protomyxzoa rheumatica
caatggaatcgaaagtaatgcaatagtttctaaagtaattgaatgggatggaatcgaattgacttgaccggaaagttaaggagtggaatagaacggagttgaaattaatggaaggaaatgtaattaaatt

SEQ ID NO: 145 - DNA, 135 bp, Protomyxzoa rheumatica
taggggtgctatggttgtatagaagtgtgggtaatccaacacaagtgggaggtgaggagaagataggaagttttcttattgaaaaattttatatctgcctgaagtacgagaaagcagaatgtgatcaggaggtgt

SEQ ID NO: 146 - DNA, 197 bp, Protomyxzoa rheumatica
caagaaatcaacccatatcgatgaattgaatcagaaactgagaaccaattgctaaattacatacgtttaatgccaaaatgcccaattcaattccaatcaattagagaaactaatgctacactgagaaactgaataaaaaattgtactttaacacgagatgtgaacttaagagagaaactgtgcaattagggattcta

SEQ ID NO: 147 - DNA, 184 bp, Protomyxzoa rheumatica
agcttttatttttcattcacagttgttcttcccctcccaattatgaaaaatgaatcatttaatattgagtttgtgggagaaatgatggctggctgcaccactgaaaagggatcaagtatgttcatctggaaagtgctgatgatgtacaactgtgctgcaaaggcaggtttttctaagaagtctt

SEQ ID NO: 148 - DNA, 254 bp, Protomyxzoa rheumatica
ccccattccattccattccattccacgccacccccttccactccactccattccatttaatacctttgactccattcgactccaaagtactccacttcaatcccctgcactccattccattccattccactctattccactccactccattccattccatggcattctactccattccactgcactcccttccactccactccattctactccattccattgctccactccactccactccattctactccatt

SEQ ID NO: 149 - DNA, 1550 bp, Protomyxzoa rheumatica
cgaatgcaatggtctccaatagaatggactcgaatggaatgcaattgaatggaaaggaataaaatttaatggaatcgaatggaatggaatcgaatggaatggaatctagtggaatggaatagaatcgatacgacccgaatggaatgaactggaatagaacggtctccaatggaatggaatcgggtggaatggaatcgattggaatggaaagaaaatgaaaagaatggaaagcaatagaatgaaaaggaatggaatgaaatggagtcaatcgaattgactagaatggaatggaatgtacatgaaagtaatgaactggaatggaatggagttgattcgaattgtgtctaacggaatggaatcgaaaggaatggaatccaatggaatgcaatcacaaggattggaaaggaatggaatggactcgaatggaagggaataaaatggaatggaaaggagtggactggaatggcatggactcgaaaggaatggactggaatggaaccgttccgaatgaaatggacccgaatggattggaactgaaaggtatggtattgaatggaatggaatcgaatggaatggaatggactggaatgtaatagaatggactggaatgaaatggactgaatggaatagactagaatggaatggaatcaaatggaatgggctcgaaggaatgtattcgaatggaatggaatcaaatggaatggaatagaatggaagggacttgaattgaatggattgttacggaacggtattgaatggaagggaatggaatggattggaatggaatgcaatggactggaatggaatagactcaaaaggaatggaatcgaattgaatggaattgaacggaagggaatcaaatggaatggaagcgaatggaatggaacggaatggaatggaattgaatggaaaataagggaatataatggaatggactctaatggaatggactcaaagggaagagaatagaatggaatagaatggaatggaatggaatggacacgaatgcaattgattggagtggtgtggaatggaatgaaagggaatggactctcatggaatggaacgcaatgaaatggaatggaaatcaatggaaaggaatcgaatggaaaggaatggaatataatggaatcaaatggaatggaagggaatggaatggattcgaatggaacgtaatggcatgaaatggaagggaattgaatggaatgtattggaatggagtggaatggaatggcatggaatggaatcaaaaaaatggaattgattatcataaaatctaatggaatggaatagaatatatttgaatggaatggactggaatggaatggaatcaaaaaattggaatggagtggaatggaatgtagtgtaatggaatggaatggaatggacttgaaaggaatcaaatgtaatggactagaattgcgtggaattgtatggaatggaatggagtaaaatggagtggactggaatggaatggaataaaatggaatggaatctaatggaacggaatcaattggaatggcctcgaattgaatggatccgaaagaatt

SEQ ID NO: 150 - DNA, 254 bp, Protomyxzoa rheumatica
tggaatggattggattggagtgcagtgcattagaatgtaatggcgtggtgtgggttggaatggagtcgtgtggaatagaatggaggggaatggaatggagtagagtggaatggagaggaatggaatggagtggaatggaggggagggtttgtaatctattggaatggaatgtaatttaattgagtagaattgaggggaaaggaatggaaggtagctgagtagaattgaggggaatggaatggaacaaagtggag

SEQ ID NO: 151 - DNA, 188 bp, Protomyxzoa rheumatica
gactcgaatgcaatggactggaacaaaatggaatcgaacagattggaatcgaacagaaagaatggaatggactggaatggaatggactcaaatggtatagaatcgaatgtaatggcatcgaattgaatggaaaggaatggaatggaatggaccaaaatgtaatggactcgaatggaatgaattcaaat

SEQ ID NO: 152 - DNA, 235 bp, Protomyxzoa rheumatica
gtattatggactgttcgatgcacgtgtcgtaattggttgtgataactgcggccacgcgccctttttcaaccgccttagctatcttcaagtggaagatattcggcttgccaccacggtacgcctccgagaatattcgtttagcgtcttgatcgaacggataagcattgaagagttgctcgaatggagtctctcgagcgaacttgcgtatgattcttatacgcgctttgttactttc

SEQ ID NO: 153 - DNA, 128 bp, Protomyxzoa rheumatica
ttccattccattccactccattccttttcatcccattccattccaatccatttcgttcaactcctgtccattccaatgcactccactccaattcattccattgcattgcattccatgccattccattc

SEQ ID NO: 154 - DNA, 254 bp, Protomyxzoa rheumatica
ggaatggagtggagataaatggagtggaatggaatgaggaggtgttgaacgaactggattgggattgaatagagtagaaaggaatggattggagtggactggaatgcaatggagtggaatggaatagagtggaatggcatggaatggaatagagtggaatgtaatggaacggagtgtagtggaatggagcagaaaggaatgaaagagaatcaaacagaaaggaatgtaactaagtggagtggagtggaatggaa

SEQ ID NO: 155 - DNA, 476 bp, Protomyxzoa rheumatica
aatggaatggaatggaatggaatggaatggaaaggaatggtggggagtggaatggaattgaagggaataaaatgtaatggagcggagtggaattgagtgaagtggaatggaatggagtgtaaatgagtggaatagaatggaatggaatggagtggagtggagagaaaggagtagagtgcagtggaattgagtggagtagaatggagtcgaatggagtggaatggagtgaaattgaatggaatcgattgtagtggaatggagtggagtagaatggaagggaggggagtggaatgaagtggactggaatggaacggaatgtaaagaaatggactggaatagaacgaaatgtaaagaaatgaagtgaagtggaatggataggaggggagtggagtggaatggtatgcagtggaaagcagttgaggggagtggattgggaaggaatatagtggaagggaatggaatggagtggaatggaa

SEQ ID NO: 156 - DNA, 126 bp, Protomyxzoa rheumatica
cattgtcgaaagtaatcaaatggaatcatcaaatggaatcaaattgaatcatcgaatggaattcaatagaatcagcatcgaatgaaatcaaatggaatcaatatcgaatagaatcaaatggaatca

SEQ ID NO: 157 - DNA, 191 bp, Protomyxzoa rheumatica
ggagtggaaaggaaagcagtggagtggaatggattggagtggagtggaatggaatctaatggaatggagttgaatgaaacggagtggaatggatttgtatggagtggagtggaagtgaatggaatgcaacggagtggaatggattggaattgaacggagtgaaatggaatggagtgcagtggaatggaatg

SEQ ID NO: 158 - DNA, 193 bp, Protomyxzoa rheumatica
agaatgaatccgaatggaatggaattgaaaggaatggaatcgaatggaatggaatcaaaaggaatttaatcgaagagaatgcaatagaagggaatggaatggaatggaatgaaatggcttcgaatgaaatcgaatggaatgcagttatgtggagtgaagtggaatggaatggagtggaatggaatggagtgga

SEQ ID NO: 159 - DNA, 285 bp, Protomyxzoa rheumatica
taatggactgtaatggaatggacacgaatggaatggacatgaatggaatggaatcgaatggaatgtaattgaatgtagtggattctaaaagaatggaactgaatggcattgaatggaatcgaacggaatgtgatgaagtggagtggagtggaaaggagtggaatggaatgggttggaatgcaactgaatagagtgcagtggagtggagtggaatggagtcgaattgaatgaaatgggaaggaatggaattgaatggagtgtagtggagtggagtggaatgcaaat

SEQ ID NO: 160 - DNA, 408 bp, Protomyxzoa rheumatica
cgttctcgcccgatgaacttcgatcttgcgagctgaacaactgcacatttgacagttgcaattttcgcggctcgcaatggacaaagattcaggtcaggttgacccacttttcccattgcaactttatggaatcatccatccgcgactgtgagtttcactcagccagcttcaaactctgccaattcaaaaagagtagcctgacccaaacaacgttcggcaacactcacttcgaagaagttgatctgggtaactgtacagccctgtttctcttcctttcggattgtcacttttccagatgctcattgaacgccgaatctgttggattcacctacggtctcaccgaagcgaatattgatgagctaggactgctgtatctcggacgccgtcagcgaaaacccaaaggcgtag

SEQ ID NO: 161 - DNA, 231 bp, Protomyxzoa rheumatica
cccggtaacttgcaggcaaggagagaggggggacttaatcgcctcttgttcagtagctgaagatgagatttcgtgcagcgctcccacaaaactccatagcgacaagagcggaagtcgctcctgtccgcgcaaaatttgtaagatttgcgcgaaaaaaagcacctcatcccaatcagaaatcgcgcccttagcggcggcaagcttaatgctatcagttgcacgacggattga

SEQ ID NO: 162 - DNA, 607 bp, Protomyxzoa rheumatica
aatggaatggaatggaattgattcaaatggaatgtactcgaatggaatggactcaaatggagtagagtgtaatggaatggaaaggactccaatattatgggctggaatgcaatggactcgaatggaacggactcgaatggaataaaatggattggaatggaatggaaaggaatggacttgaatgtaatggagtggaatgtagttgattgtaatggaatgtatttgaatggaatggctttcaatgtaatgtaatataaccgaatggaatgaaatggaatggaatgggaaggaatagaatggattggaaaggactcgaatgtagtgggctccattggaatggaatccaaaggaatgaaatagaatggaatggaatccaatggaatggaatagaatggattggaatccaatggaatggaatcaaatggaatggagtggaatgcgatggactcgaatgaaatggactggaatgtaattgtctctaatggaaagcaatggaatggaatggaatcaaatcgaatggaatgtaatcgattggaatagaatggaagtgaatggaatggactcccatggaatgtactcgaacagaaagcaatcaaatggaatcaaa

SEQ ID NO: 163 - DNA, 322 bp, Protomyxzoa rheumatica
ctgatagtttgtgatatatatctcgttgctctgtactcggacatcaggggaaataatcgttactccattattcaaaataccaaatcttgcagacgaggctgcgctcgttaaagacaatcgaatttccttatttattgcgctgtcgtcaaaatcgatgaagtcgcggacgttctcatcaaaaattgatcggcgaagtcctccgcgatcgtcagtcaggatgcgatctacaaagctcttggcggacactgtcaccacataactttcctcgatcccttcactcttcgggaaggaggcagagcccagaatctctatctgtgcttcg

SEQ ID NO: 164 - DNA, 191 bp, Protomyxzoa rheumatica
ttccagcgagtcatcggcagtcttggaaaagtcaagtcaggacgtccggatattttgtgctacatcgcaaccactgccggaagactggatgcgatcgagattaagtctgcaatctccgctttttcctctcgccttgaagaaacgggcctttttacatctgccgaggttcttcccgttggaagagacgcgct

SEQ ID NO: 165 - DNA, 219 bp, Protomyxzoa rheumatica
ctccatttcattccactccactccactccattctattccactccactccactccattccgttctactcgaatccattcctttccactccagtccattccattccactccactcctatccatttcactgcattccactccattccatttctttccactccactccatttcatttctttccaccccactcctctcatctccactccactctaacccattct

SEQ ID NO: 166 - DNA, 441 bp, Protomyxzoa rheumatica
atggaatggaatggaatggaatggaatggagtggagtggagtggattccaatgcaatggattggagtggagtggagaggattggaatagaatagagtgaaacggagtggaatggaatggagtggagtgcaatggaatggagcagaatggaatggagtggaatggaatggagtgtagtggagtgttatggaatggtgtggagtgtagcggaatggaaaggactggaatgtagtggagtgtaatagaatggaaatgagtggaggggaatgtaatgggatggagttgtttggaatggagtggaagggaatggagtggaatagaatggaagggaatggaaaagaatggaatggagtaaaatggaacggaatggaaaggaatggaatttaaaggaatggagtggagtggaattgaatggaaaggaatggaacggaatgtaatggaa

SEQ ID NO: 167 - DNA, 135 bp, Protomyxzoa rheumatica
ggaaggaatggaattgagtggagtggattgaagtggattggaatgcagtggaatggaatggaatagagtgaagtggaacggagtggagtgaaggggagtggagtgtaaaggaatagaatggaatggaacagaaca

SEQ ID NO: 168 - DNA, 164 bp, Protomyxzoa rheumatica
aagtggaatggaatggaatgcaatggaatgctacggagtgcaatcaagtggaatgcaatcaaatggagtggaatcgaatggaatggaatccaatggaaaggactggcatggaaaggactccaatggattggactggaataaaatggaactgaacggattgcaat

SEQ ID NO: 169 - DNA, 428 bp, Protomyxzoa rheumatica
gatggagttgtttgcagtggagtggaatgtagttgagtggagttgagtggagtggaatggagtggagttgcgtggaatggagtggagtgtagtagaatggaatagagaggagcggagtggaatggaatggattgcagtggaatggacttgagtggagtggaatggactggagtggaatggaatggagcagtcgagtggagtggaatttactggagtggagtgcagtggaatggaatggaatggaatgaagtggagttgagtggagtggagtggattgaagtggaaaggaaaggagtgcaatggaatgcagtgaagtggagaggagtggaatgaattggaatgaaatcagatgtaatggaatgtagtgcaattgagtggagtggaaagcaatggacggaacggaacagaactcaatggaacaaaatgga

SEQ ID NO: 170 - DNA, 158 bp, Protomyxzoa rheumatica
agtccattccattccactattctcaactccactccactccactccactccgctctactccactccatttcattcatgtccactccatttctttccattccactccagtccattccactcctttccaatccactctgctccactacattccattccaat

SEQ ID NO: 171 - DNA, 753 bp, Protomyxzoa rheumatica
atggagtggaatggaatggaatggagtggaatggagtgaaatggagtgcaatactgtgaaatggaatgaagtggagtgaaatggattctaatggaatggagtgtattggattggagtggagttgaattgaattgagtggaatagagtggaatggagtggaacaaagtggagtgaaatggaatgaattggagaggcataaaatggagtggagtggaacgaggtggagtggagtggattggagtggaatggagtagagtggaatggagaggagtgcagtggagtggagtgcagtggaatcgagaggagtggaatggagtggagtgcagtggaagggagtggggtggaacggaatggagtggaatggagtcgaatggaattgagcagcattaaatggagggtagtagaatggagtggaccagagtgggattgattaggatggaaaggaatgaatgaaatgcacggcaattcataggaatggaatggaatgaaatgcactgcaatttattggaatggaatggaatggagtggagtggaacgcagtgggttggagtggagtggagtagattggagtggagtagattggagtggcgtggaatggagaggaataaaatggagtggagaggaatggtgtgggatggaatggaatgaagtggagtggagtggaattgaataaagtggagtggaatggaaaggattggaatgaaatagagtggaaaggaatggaatggagtggaatggaatggaatggagtgg

SEQ ID NO: 172 - DNA, 198 bp, Protomyxzoa rheumatica
tgcattccattccaatccattccattccattccattccactcaagttgattccattccattccattcaattccattccattcctttccattccattacattacattctattggggttgattctattcaattcctttacactccattcgattccattagattccacacaattccatttcattccattccattccaattg

SEQ ID NO: 173 - DNA, 173 bp, Protomyxzoa rheumatica
ggaatggaatgcaatataatggaaaagaatcaactcgagtttaatggaatgaaatggaatggaatggaagttaatggtctgaatttgaattgaatggacccgaagagaatggaagggaatggaatggaatgaattggtctcgaatgcaatagattgcaatgtaatcatctcga

SEQ ID NO: 174 - DNA, 168 bp, Protomyxzoa rheumatica
aagtaactgagttgaatctgccttttgatagagcagaattgaaacaatccttttgtagaatctacttgtggatatttggaactctttcaggaattcgttggtagttggtatcttcccaaaaaaaggagacccaagcattctcaaaaagttctttgagatgtgtgcctt

SEQ ID NO: 175 - DNA, 150 bp, Protomyxzoa rheumatica
cattccattcaattcccttccactgcactccgatcccccccactcaactccattccgatccactctgtccccttccattctattctcttctgttctgttccattccatttcactccattccattccactccattccattccactccactc

SEQ ID NO: 176 - DNA, 163 bp, Protomyxzoa rheumatica
atgaatgtaatctgaattactatttaggaaaggttttggacaaatttattctagttttggatttgtagatttgatttatttatgtttattcacgcctcaaatatgtatatataattgttgaaatgaattttagtatagtgacatgtttaaaatgggacatttt

SEQ ID NO: 177 - DNA, 154 bp, Protomyxzoa rheumatica
ccctttatttccctgtccttctagtcaaatgttaattctactcgcatggttttcatttctaaaagctttcctgattttcggaaggtgctcctctttagagaagaacatcgtgttctttcaaggatacagtatattcccttatatctcagatgtc

SEQ ID NO: 178 - DNA, 179 bp, Protomyxzoa rheumatica
aatcaaatggaatggaatcgaatagaatagaatcaaataggatcaaatggaatcgaatgggattgaatggaaagcggtgacattgggtggagaggagaggaattgagtggaatggaatggggtggaacgcaattgaatggagtagcttggagtgaagtggtattgagtggaatggaatg

SEQ ID NO: 179 - DNA, 283 bp, Protomyxzoa rheumatica
cattcagctccattccattccattccattgtattccattccattctaccccaatccattcctttccattccattgcactccactctgttcgattccgttcccctccattctactccactactttccattacattccaaacgattccacaccactccactcgattccactccattccattccattcctttcatttccactcctctccactccacaccattctattcaattccattccactcaactccactcctttccactccactccactcatttcaccacact

SEQ ID NO: 180 - DNA, 122 bp, Protomyxzoa rheumatica
ccattccatttcattggattccaatccattagagtccattactttaaattccatgcaattccactcgattcctttccaatacatttaattcaagtccattccattcaaaccctttccattcc

SEQ ID NO: 181 - DNA, 331 bp, Protomyxzoa rheumatica
gaatggaatggaaaggagtgtagtggaatggagtggagtgcagtgtattggagtggaatggagtggagtggagtgcagtggagtggaaaggagtggagtggtgtggagtggaatggaatggaactgaactgcacagagtggaaaggaatggaaaggagtggagtggagtagcattgagtggaatggatgggaatgctttggaatggaatggaaaataatttaatgaaatttagtggagtggaatggagtttagtggagtggagtggaatgaaattgaatggattacagtttagtggagtggagtggagtggaatggagtggaatggagtgg

SEQ ID NO: 182 - DNA, 241 bp, Protomyxzoa rheumatica
ccactccattccattccattccactccattccattccttttcaatcctctccactcctttcctctccactactgtccattccactccactgcattccactcttctccattccattccatttcattccactacactgaatttgactccattacattccactagaatccattcctctcaactccatcccagtgcactccactcaaatccaatccactccaacccactctgttccactccactc

SEQ ID NO: 183 - DNA, 155 bp, Protomyxzoa rheumatica
tggattggaaaggagtggagtggattggagtggaatggaatggactggagtggaattgagtgaagtggacaagaattgaggggaaagcaatggaatggaatgtagtggaatagagtggattggaaaggagtggagtggattggagtggaatggaa

SEQ ID NO: 184 - DNA, 153 bp, Protomyxzoa rheumatica
gggaaatgcaatggaatcgaaagtaatggagtggagtgcagaggagtggaatggagtggaattcaatggaatggaatggattggagtggaggcgagtgaaatagaatggaatggagtggattggagtggaatggagaagatggagtggagtgt

SEQ ID NO: 185 - DNA, 171 bp, Protomyxzoa rheumatica
ctacaatccactccattccattccatttcattccactccaatccattccattccactccactacattctactgcgctccactcctctccactccattccattcaattccaccccattctattcaaatccactccattccattccattccattccactgcactccgatccac

SEQ ID NO: 186 - DNA, 140 bp, Protomyxzoa rheumatica
ccattccattccactacactgcactctattctacgacattccactccattcctctccactccactgcactgcactccactccactcttttgcattacactccattccatttcactgcactccgatccattccacagaact

SEQ ID NO: 187 - DNA, 209 bp, Protomyxzoa rheumatica
ggtatgggagggaatggagtggaatagagtgggagggaatggagtggattggagagtggtggaatgagtaggagtggagtggaatggaatggacaggagtggtgtggagtggaatggaatggagtagaaaggaaaggactggagaggaatggaatggaatggagtggagtggaatggaggggaatggagtggagtggaacagattggaa

SEQ ID NO: 188 - DNA, 133 bp, Protomyxzoa rheumatica
gatgatagtaaggaggatgatgatggtggtgatagtgatgataatgatggtgatgggtgtgatgacaatgatggtgtggccatgttggtgataatggtgctggtggtgatgatagtggttgagatgatggtga

SEQ ID NO: 189 - DNA, 178 bp, Protomyxzoa rheumatica
gaatggaatggactggaatagaaccaactcgaatgtaattcattgcaaagtaattgattcaaatggaatggaaatgaatggaatgtaatctaatggaatggaatgcaatgcaatggcatggaatagaatggaatgcaatggcatgaaatataatggaatgcaatggtatggaatggag

SEQ ID NO: 190 - DNA, 244 bp, Protomyxzoa rheumatica
gaatggaatggaatggactcgaatgaaatggaatggaaagtaatcgaatgtaatgcaatggattcaaatgtaaggtaatagaatggaatgaattcgaatggaatggaatggactgaagtggaatggaatggaatggactctaatggaatagaatggaatggaatggactcgaatggaacagaatggaatggaatggaatgtactcgaatggaatgaaattgaatggacaagaatggaatggaat

SEQ ID NO: 191 - DNA, 141 bp, Protomyxzoa rheumatica
ctttcaattcctttccattccattcctttccattccataaaattgcattccattccacgcaactccataccattccattccacgcaactccattacactccattctatttcattcctttccatcccattccattccattcc

SEQ ID NO: 192 - DNA, 143 bp, Protomyxzoa rheumatica
agtggagtggagtggaatggagtgaagtggaaaggaatacagtggagtggactgaacaggagtggatggaatttagtggaatggaacggagtagagtgggatggaatgcaatgtagtgtaaaggaatggaacagaaaggaatg

SEQ ID NO: 193 - DNA, 129 bp, Protomyxzoa rheumatica
tattactttaaccatccatggctattcctaatggcttatggtcttccacaatgagattttctgatccaaagtctcaggttggtattgaagcaaatttttttgacacttaaaaatattaaatgtgagtaa

SEQ ID NO: 194 - DNA, 151 bp, Protomyxzoa rheumatica
cattactttccactccattccattccattccattcgcgttgattcttttccattccatgcccttttattacattccaatccattccattgcattccattctatactattccaccaaagttgattgcaggttattccattccattccattcc

SEQ ID NO: 195 - DNA, 167 bp, Protomyxzoa rheumatica
cattccattgcattcaattccactacactcgtctacactccactactttccatagcattccactccaatccattccaatccactccactccattccactccactgcactagaatccactccattgaactccactcctctccactccactccactccattccattcca

SEQ ID NO: 196 - DNA, 505 bp, Protomyxzoa rheumatica
tggagttgactgcagggtagtggagtggagtggattggaatagaatgcactggagtggaaaggaattgaatggaatgcaatggaagtgaatggaatggactcataaggaatggaatcaaatggagtggaatcaaatggcatcaaatggaagtgaatggaatgctgtcaagtagagtggggtggaatggaacggagaggaatttaatggggtggaatggaattgaatggagtggagtgtagtgaaatggagtggagtggaatggaatggagtgcaatgagaggagcggagtgtagtggagtggaatcgagtggaatggaatataataaagtggagtggaatggagtttaaaacaggagtgtttggagtggagtggaaaggagtggagtggagtgaaatggagtggactggagtggattgcaatggagtggattttaatggaataaagtggagtggactggagtggagtggagtgaaagatgcggattgcaatggaatcgtgtggag

SEQ ID NO: 197 - DNA, 127 bp, Protomyxzoa rheumatica
aatggaatggaatggaatggaatggaaggaatagaatggaattgaagcagatggaatggaatggaatggatgggagtcgaatggaatggaattgaatggaatggcatcagatgtgatggaatggaat

SEQ ID NO: 198 - DNA, 232 bp, Protomyxzoa rheumatica
ttgaatctattactttgcaatctattacattcaattcggttctattccagtccaatcctttccgatccattccattcgattcttttccgaactatttcactaaattcaattcgattctctttgaatgaattccattctagagtgttccttttgattccattttatttgagtccattccgtttaggtccattacatttgggtcaatttaattccatgccattccatcccattc

SEQ ID NO: 199 - DNA, 296 bp, Protomyxzoa rheumatica
ccattccattccattccattcctttccattccattccattgtactagggttgattactttgcattccattccatttcattccattccattccatttcataccattccattgcattccattccattccactaggttgcattccattccattactttccaatccgttccatttagctgcatttcattgctgtacattcaattccattcgattccataccactccactctactcgggttgattgcatttcattccattccgttccattccattccattccactcgggttgattccattc

SEQ ID NO: 200 - DNA, 471 bp, Protomyxzoa rheumatica
aagggctaatgcaattgcgatctctgggaaaggatttgcaggcatatggaagatcgctatcaggtggagatccgttatcttctgaaggtgcggaagatatggagagtgaagttgatcgtagagttttggtgcaactgaacaaggccagcaaaaaccaaaggcttagggcgctaagagaattatgggctaagtatccggaacaccctgatacgattgcggcgctttatgacggaattacaagtcaggctccatcggaggtccgagaattatgcgtcggcgctctgattcaagcgtataagcgaaaattggtaggaggagaatgttttgtggctctgttggagtcattcaaatcggtgccacatgattctcgcctcacaattttaagggcgctgaggggcgtacagggtcaagaactgggacgagatcggggagggatcgtggatggaattcttgccgttctggaagtgtccg

SEQ ID NO: 201 - DNA, 133 bp, Protomyxzoa rheumatica
ctcctttatcataatctataaaaaagttcatataaaattttatccagtttcttaaaatataattgtatagtcaattcatatgaaccaggattcaaataagtttattcactgcattcggatgataggtctctta

SEQ ID NO: 202 - DNA, 320 bp, Protomyxzoa rheumatica
caacacatactcatatacattcacaacacactcccatacactcacacacgacacactcatatgcacaacacatacacacaacacactcatacacaacacacacaacacgctttcatacatacacatacactcacaacacacatacacaacacactcatgtatactcacacacactcaaaacacccacacccaccacacacacaacacactcatgtacactcactacacacaaaactcatgtactcgaaacacaacacactcaggtacactcacatatacacatatacactcagatacacatattcaacacacactcatgt

SEQ ID NO: 203 - DNA, 123 bp, Protomyxzoa rheumatica
caagtgttgtgtgtagtgagtgtacatgagtgtgtgtggtgagtgtgggtgtgttttgagtgtgtgagtgtatatgagtgttgtgtgtatgtgcgtgttgtgtttgtgagtgtacatgagtgt

SEQ ID NO: 204 - DNA, 236 bp, Protomyxzoa rheumatica
actctattcaactgcactccattgcattcctctccaatacactctactcctctccattccgttttattgcattccattccactgcactccactccattccattccactcaattccaattaaatccatcccattgcattgcattccattccattccactcctctccattctactccactccacttcattccattccaatcgattacactccattccaatccactccactccattcca

SEQ ID NO: 205 - DNA, 276 bp, Protomyxzoa rheumatica
tcaatttgatcgtcttattttagcgaaggaggcaacttgatggattgggagcgggtaaatacatggactacgaccctgtatgcgttgatccaatcgctccggatcgcgaaggccgtcgaatttggaaatatgccgaatttgccgcaaagcattctggaggcgggcgcttggctaacgccggaggcctcgtattcttccgtgcttgcatctaagccttttggaagaagcgccgtcaagttcaggcgtaacccaaacgcccactttgaagaggtcgtt

SEQ ID NO: 206 - DNA, 169 bp, Protomyxzoa rheumatica
ctgctagcgatttcttgttccagcgacagcgggcgtgggtgagtacgttgcgcgcggcaatcagttcaaggcagccgcgcctcgcccattcaaatttcggatccagatgtgttgcaagtttctcgactttcgactgtggaaatgaccccgcggtttcgctgcgagcgga

SEQ ID NO: 207 - DNA, 184 bp, Protomyxzoa rheumatica
taggatgataaaccgaaaggttaacaatatagttagtgataaatgtaaaatctcttacttaacatattgagatttaccaacaatgttatggatttttttaaaattttttgttataaccatatgaatatatataattccatattgctgtaattatttcaccagtaattgtggtggttagttttga

SEQ ID NO: 208 - DNA, 188 bp, Protomyxzoa rheumatica
tccattccattcctctccactccattccattccactccactctactccaaactgttcaattctattccattctattccataacattccattccactccattcagttccacaattctgtattccattccactccatttcacttcactccactgcactccactcatttctactacactccattccactcc

SEQ ID NO: 209 - DNA, 162 bp, Protomyxzoa rheumatica
cattgcattccattccattccagtcgggttgatttcattccattccattccattctagcctttccattccattccgttcctgtccattccattcatgtccattccattccgttccattccagtccactggtgtttattccattccactccattccattgcat

SEQ ID NO: 210 - DNA, 177 bp, Protomyxzoa rheumatica
cagaaacttctttctgacttgtgtactcaactaacagattagaacttgtcttttgttagagcatttttgaaagactcctgttatagaatctgccagtgtatatatttggattgctttgagtatttcgttggaaagggattatctccatatgagaagtagaagcattctcagaaactt

SEQ ID NO: 211 - DNA, 134 bp, Protomyxzoa rheumatica
ccattccactccattccactccattccactccactccacttcaccgcattccattcgattccattcaatgccattcgtttcgactccatttgattcgattccattccattctatgccattccattccattccat

SEQ ID NO: 212 - DNA, 136 bp, Protomyxzoa rheumatica
tagaatggaatggaatagagtgcaggggagtataatggcatggaatggagtggaatgaactgtagtggtgtggattggaatggatgagagtggaatggaatgaaacggagttgtttagaatggaatggaatggaat

SEQ ID NO: 213 - DNA, 148 bp, Protomyxzoa rheumatica
attgcgttccatttcactccactccattcaattccactacattcctttcgagtccactccactccactacattcctctccattccattccacaccactgacctcccctccacttcataccattccatctcactccacttcattccatt

SEQ ID NO: 214 - DNA, 326 bp, Protomyxzoa rheumatica
ctgcacgccagcctttgtggcagagtgagatcgtgtggaaagaaaggaatggaatagagtggaattgtatggaatggaaaggagtgaagtggggaggagtggagtctagtggaatgcagtgtaatggaatgtgatggaaaggaatggcatggagtggagtgccaagtagtggattggagtggtgtagagtggaatggagtggaatggaattgaatgccatggagtgaagaggagtggagtggattggagtggagtagagtggaatggagtggagtgaaatggaacggaatggaaaggaatggaatggaatgcagtggaatggaatg

SEQ ID NO: 215 - DNA, 326 bp, Protomyxzoa rheumatica
agtggaatggagtggagaggaatggaatggaagggagtggagaggagtgaacgggagtgtagaggaatgtaatgggatggaatccaatggaatgaaatggaggggagtggagtggagtgttggggagaggaatggagtggtatggaattggatggaattgaatgtagtggagtggagtggcatggagaggagtggagtagagtggagtggaatggcacgaaattgaatggagtggagccgagtggagtggagtggagtgcagtggagtggaatggaatatagtggaatggaaatgaatggaatggaaaggaatgtaacggaataga

SEQ ID NO: 216 - DNA, 123 bp, Protomyxzoa rheumatica
agcaattgaatggaatggaatggaatggtatagaataaacccgagtggactggaataaaatggaatggaataaaatggaatggaatggtatcaacccaagttgaatggaatggaatggaatgg

SEQ ID NO: 217 - DNA, 447 bp, Protomyxzoa rheumatica
gtggagtggaatttagtgaagcagattcgaatggagtacagttgagtggaatggaatggaatacaaatgagtgcattgcagtggaaagatacggaatggaatggagttgaatggaatggagtgcagtggagtgaaatcgagtggattggaatttattgaagtggagtggagtggagtggaatggaatggaatggaacatattggagtggagtgcagtggagtgaaggggagtatggaatggaagggaatggtttggagtggaatggaggggaatgaaatggagttgaatggagtggagtggtttggtatgtagtggtgaggaatgcaatgcagtggaatggaatggagtggaacggaacggaatggaatgtagaggaatggaatggagtgcaatggaatggaatacaatggaaaggaatggagtgttgtagaatggaatggaatgga

SEQ ID NO: 218 - DNA, 312 bp, Protomyxzoa rheumatica
aaggaatggaatgtaatcgaatgaaatggaaacgaatggaatggaatggaaacgaatgtaatagaatggcatggaatggaatcaaacgtactggaatccaatggaatagaatctaatggaatggaatgaaatggaatggaattggtcagaatggaatggactggaatggaatagaatggattggattcaaatggaatggactcgaatggaatagacatcaatggaatggtctcgaatggaatggaatgaaatcgtatagaatcaaatggagtggaatggaattgaattgaatgggagggaatcgacaggaat

SEQ ID NO: 219 - DNA, 295 bp, Protomyxzoa rheumatica
cattccattccattgcaatccactgcattccaatccattctattccactcccttactttcacttccattcctttctattctacaccattccattccattccactccattccattctattccaccaccataagaaccactccattccactccactccacttgactccacgccactacaatgcattccactccactccattcctttctaatccactccattccactccacgcctctaaactccattccgttccaatccattcaaatacactccatccacaacattcctttttattct

SEQ ID NO: 220 - DNA, 141 bp, Protomyxzoa rheumatica
tggaatggagtggagttcagtggagtggagtgcaatggaatggaatggtgtagagtggattggaatggcatggagcggaatggagaggagtgggatggaatggaacagagaggagtggaatagagtggactggagttaagt

SEQ ID NO: 221 - DNA, 245 bp, Protomyxzoa rheumatica
attcaattccattcccttccgttccaatccattccattccattctattcctttaaattcctttgctttctactcgggttgattctattccattcttttccatagcattccataccattccattccattctactccactcgggttcatccaattccattccattccattccattccattccattctactccactcgggttcatccagttccattccattccattccattccattccattccattcc

SEQ ID NO: 222 - DNA, 139 bp, Protomyxzoa rheumatica
ccattgcattccaatcgtttccactcgactccactccactctgttcagttacattttttcacattccattcctttccactccaatccacgtcacaccactccagttcaccgtctgccatttaattacattcaatgccat

SEQ ID NO: 223 - DNA, 142 bp, Protomyxzoa rheumatica
ggaatggagtgtactggaaagaaatccaatggaatggaatggtctcgaatggaatggactagaatggaattgacaccgatggaatggactggagtggaatggacaggaatggaataaaaacgaatggaatggtatggaatag

SEQ ID NO: 224 - DNA, 251 bp, Protomyxzoa rheumatica
attccattccattccattccattccattccattccattagggatgactccagtccattccattccattcaattacattcaaatatggttgcttccatttaattccattgctttccattccattccatttcattccaataaattccattccgttcctttccattccatttcactcgtgttaattccattcaattccattccattccattcccctcgggttgattccattccattccattccattccattcca

SEQ ID NO: 225 - DNA, 281 bp, Protomyxzoa rheumatica
attccacggaattccgttccatttcactccaatccattccattttattccacccgaccacactccactctactacaaccattccattccattccattgtcttccactccagtcaattccattgcaatccacccaattccattcttttctattccattccactccactccactccagtacattcgcttccattccattctgctccattccactcgaatccataccattccattccacaccattccattccacgctattccattccgttcctttcaattccat

SEQ ID NO: 226 - DNA, 168 bp, Protomyxzoa rheumatica
gaatgaaatgaaatggaggtgaatggaattgaatggaatggagtggagtggagtggagagtagtggagtgttgtggagtggggttaaatagaatggagtggaatagagtggaatagagtggaggggaatggaatggtttagagtgggttggaatggactagaaaggaa

SEQ ID NO: 227 - DNA, 199 bp, Protomyxzoa rheumatica
caatccattccattccattcgagttcaatccattccattccctttaactccattccattccattccattcgagtccatacctttccattgcattccattagagtccattctttccatgccattacattcgagtaagttccattccattcgattccattacattacattactttgggtccattccattccattcctttca

SEQ ID NO: 228 - DNA, 202 bp, Protomyxzoa rheumatica
agatggcatcaaatggaatggaacggaatgggatggacttgaatggaatgcactcaaatctaatagaatagaatggaatgacatcgaatgtattggaatggaatgaaatggaaggcaatgcaatggaatggactgggctcgaatggaatggactggaaaaaaatggaattgaaaggatttgaatcgcacgaagcagaatgga

SEQ ID NO: 229 - DNA, 125 bp, Protomyxzoa rheumatica
tggtcctttttatagctttctgttcttgtttctttgatataatattgtctcttatctctctaaagaattaatggtagtttctataaagtttgcttcttcctatgtggtctctgatttatttttta

SEQ ID NO: 230 - DNA, 503 bp, Protomyxzoa rheumatica
aattccattccattcctttcttttccattccatttctttccattcgagtctttttcattcctttcctttgcattcgagacagttccattctgatccattcaattagagtccattccattcgattccattccattagattccattctattcgactgcattccattcgagtccattccattccattccattgcattctattccattccatacgattccactgaattccagtcctttccatttgaatcctttccagtccattgcattccattctattccattccatttcattcctttccattcgaatccattccattccataccattccattccatctcattttgttcgattccattcctttccagtccaatccattcgaatcaattgcattccgtttcattagattctattcagttcgatttcattccatgcaattacattccaggccattcctttcgattcgattccattccattccattcctttccattccatttcattccat

SEQ ID NO: 231 - DNA, 1135 bp, Protomyxzoa rheumatica
gtggagaagaatggaatggagtggattggaatagagtggagtgtagtggaattgcgtggaatggaatgcagtggagtggcataaagtggaattgtttggaatggaatacaattgactggaatggaatggagtggaattgagtggagtggaatggagttgagtggaatggattggagtggagtggaatgtagtggagtggagtggagtgaagtggagaggaggggaatggagtggagtaaattggaggagtgtggaatgtagtggaatggaatgctctggagtgtagtgtagtgtattggaatggaatggagtggagttgcatggagtggagtggagtggaatggactagaatggagtggaattgagtggagtggaatggagtgcagtggagtggagtggaatggaatggagtctagtggaatggagtggaatggagaggaatggagtggaatttaatggagtggaatggaatgtagtggagaggaatggagtggagtggagtggtgtggagtagagtggagtggaatgaagtggaatggaggggaatggagaggaacgaagtgtagtggagtggaatggaattaagtggagcagaatggaatggagtgcaatgctatggaatggagtggagtagaatgaagtggactggagtggagtgtaggggagtaatacagaaaggaatggagtggagtggagtggagtagagtggagtggagtggagtagagtggagtggagtgtcatggagtggggtggaatggagtggattggaatggaatggattggaattaaatggattggagtggaattgaatggaggggaatggaatggtgacaaatggattagaaagtatttcagtcgtgtggaaaaaatggagtggaagggaaaggaaaggaattcaatggaatgcactgaagtggagtgacatggagtggactgcagtggaatgaggtagaatggaatgcagtggagtggaatggaatggaatggaaaggaaaggaaagtaatggaatggagttgtgtgtaatggaatggagtgcagtgtaattgagtggactgcagtgaagtggagtggaatggagttgaatggaggggaatgaagtggagtggagtggaggggaaggaagtggagtggac

SEQ ID NO: 232 - DNA, 131 bp, Protomyxzoa rheumatica
tgagatcacggaattatctcattagctggtagagtggggacatgtgagcattttacagaaatcaaatcccaagagttcaggagagagcttgtgagtgaggaagtgtgtgtgtgtgcatgtaaatatgtgtg

SEQ ID NO: 233 - DNA, 303 bp, Protomyxzoa rheumatica
catgcacaccacacacaccacacaccacatacacacactacacacacaccatacacacaccagacacacacaccatacaccacacacatcacacactacacacacaccaaacacatacacacaccacatacataccacacacacatgcacactcgcacaccacacacacaccacacagatacacaccacacataccacacaacacacacacatacacccccacacacatacaccaccacaccacacacatatacaccacacagaccacatgcaccacacacaccatacacacatcacacacac

SEQ ID NO: 234 - DNA, 131 bp, Protomyxzoa rheumatica
cccattccattccactattctccactccactccactgtactccactccactccattcccttccattccattcctctccttcccattccattttcgtttgacaggatttcactctgtcacccacggtggagt

SEQ ID NO: 235 - DNA, 149 bp, Protomyxzoa rheumatica
ggaaagaaatggaatggaatggactgtagcggagtagagaggagtggagtggaatggaaggggatgaatcgaatggaatgaagtggaggaaggggagtggaatggtggggagaagagttcagtggtatggaattggatggaattaaatg

SEQ ID NO: 236 - DNA, 256 bp, Protomyxzoa rheumatica
aatgaatgcgaatggagagtaatgagagtactatcctgctggagggcgtgcggggttgatgcggggatcagaatctatcttctttgcaaactcctggacccggtaacttagctgatatgcttcatccccgctccgtggaggcccaataaggggatggtatccccagaaaggccctaacgcttgccaaagctccactaacgaaaatcccgtggtgtcaaattcgtcaggagcattaggacctgacttccaaaaaggg

SEQ ID NO: 237 - DNA, 147 bp, Protomyxzoa rheumatica
gacatgaatggaatggaaacgattggaatagaatcaaacaaaatagaatggaatgaaatggaatccaatggtatggaatcgaaaaaaatggaatggaatcgaattgaaaagaaaagaatggaacagaatggaatggaagggaatgga

SEQ ID NO: 238 - DNA, 241 bp, Protomyxzoa rheumatica
gaaatggagaggaagggagtgtagtggaatggaatggagtggaatatagtggactggggtggataggaatggaatgtagacgaacggaatggagaggagtggaatggaacggattggaatgttatgcaatggaatggaatggaaagaaattgaatacaatggaatggaatggggggaggggaatggaattgagtggagtggaatacaatggaatagaatggaatttagtggagtggagtgg

SEQ ID NO: 239 - DNA, 162 bp, Protomyxzoa rheumatica
catttcattccactacactgaattcgactccattacattccactagaattcattccactccattccactataatccattcctctcaactccaacccagtgcactccactcaaatccactccactccaacccactccgttccactccactccagtccaatgca

SEQ ID NO: 240 - DNA, 190 bp, Protomyxzoa rheumatica
gtggagtggaaaggaatttagtggtgtggagtttagtggaggggaatggagtttaggggaatggaatggaatggagtggagtggaatggagtggatttgacgggagggtagtggaatggagtggagtggaatggagtggagctgaacggaatagagtggaatggtgtggtatggaacggagtggaatgga

SEQ ID NO: 241 - DNA, 255 bp, Protomyxzoa rheumatica
gcgcttggcgcgagtgatatctggtaatgttctacgataaaatcaacctctccggaccatttagagcgacaccttgacgttatgggtggtcagtttttttggatcgatgatgcttggggtagcactcagtatcaacgtgagaggacggaagcttggaatcaggttttcccattgatgcaaggcgccatgaagcgcggaactaggtttcttattacgtcgcgcgactacatttggcaggctgcgcggaaggagttg

SEQ ID NO: 242 - DNA, 189 bp, Protomyxzoa rheumatica
gagtggagtggaatggggtggagtggagtggaatgcaaaggaatggcatggaatggaatgcaaaggtgaaatgtaatgtgagctaagattgtgccacggcacttcagtctgggtgtcggagtaagatccaatcgaaataaagtagtggaatggaatgcagttgaacggaatggaatggagtggattagc

SEQ ID NO: 243 - DNA, 141 bp, Protomyxzoa rheumatica
ccactccactccagtacattccattccactccactccactctactccactcctctctgttccactcaaatccgttctattcctttccttcccattccattccactccattccactgcactccactccattccattggatcc

SEQ ID NO: 244 - DNA, 129 bp, Protomyxzoa rheumatica
aatgtgtttttggtgtactgtttgatattttatgtaaagtataaaatatgtatgtggcataatctcatattttatgtagagtatatattaagtatttggagtattttaatattttatgtacagtatata

SEQ ID NO: 245 - DNA, 122 bp, Protomyxzoa rheumatica
aaggcaccaaggaaggggagggagggagggagggagggagagagagagacacagacagagacagagagagagcgagagggcgagagcgacagagagagagagagagagagagagagagagag

SEQ ID NO: 246 - DNA, 156 bp, Protomyxzoa rheumatica
gaatggagtggaattgaatgtaaaggaggggagtagagtggaaagaatagaatggaatggcatagaatggagtgcactgcaatgtaatggaatggatggaatggtatgcagtggaatggaatgtagtggattggaaaggagatgagaggatttgag

SEQ ID NO: 247 - DNA, 639 bp, Protomyxzoa rheumatica
ccattccattccactccattccatttctttcccctccctccactcctttccactccattccatagcatttcaacctattctattctactgcactccattcccctccactccattccactccactccactccataccattccacagaattccactccagtgcactccattccactccactccactgtgttccattccactccctaccattacattccattccaaaactttccactcctttccactccattccattccagtcgactctatttcactgcactccactccattccattctattccttgccattgcgtttcataacattccattcatttcaagtcactcactccactcccctccactctgtgccactctactgcattcaattccactccactcaattcctctccactcctttctattccactgcattacactccattccattaaagtccactccattccaatccattccattccagtccattccattcaattccattccattcgattccattccactcggtttctagacgttccattatattgcatttcattccattccattccattccagttgattacattccattggattccatttttttcgaatcaaatacattgcaatccattacattcg

SEQ ID NO: 248 - DNA, 126 bp, Protomyxzoa rheumatica
actgcattccattccattccactccattccattcattccactccactcaattccactccgttatactgcaatccattccactctactccattccactccactccactccatgccactccattccat

SEQ ID NO: 249 - DNA, 146 bp, Protomyxzoa rheumatica
ggattggagtggagtggacaggagtggaatggagtctattggagtggagtggagtggagtggacaggagtggaatggagtggtagagagtggaatggagtggagtgcagtagagtggaatggaatggaacggaaggcaatgcaatg

SEQ ID NO: 250 - DNA, 265 bp, Protomyxzoa rheumatica
gaatggaatcgaatggaatcatcaatgaatggaattgaaaggaatcatcatcaaatggcaccaaatagaatcaacaaatggactcgaatggaatcatcaaattgactcgaatggaatcatcatcaaatggaatcgaatggaatcatcgaacggaattgaatcgaatcatcatcgaattaaatcaaatggactcgaatggaatcaacatcgaatggaatcgaaaggactcatggattgcactcgaagagaatcatcgaatggactc

SEQ ID NO: 251 - DNA, 238 bp, Protomyxzoa rheumatica
tccactccactccactccacaacattccatcccattccacaccactccactccactgcattccgtcacatccaattccattccactccattccactcctctccactccccttctctctaaaccactccattccactccatcccattccattccactgcattccactggactcccctccaccccactccactccactttattccattccattccattcctctccattccactccactcc

SEQ ID NO: 252 - DNA, 369 bp, Protomyxzoa rheumatica
tccattccatttctttccattccattccattatattccattatattcctttccaatgcctttcattccattccactccactcccttccactccattccattccattccattcgactacaatccattcgaccccaatccactccactgtactccactccactccattccattccattccattcccttcctttccactacacgcaattccattcaactccattccataccaatcaattccattctactgcactacattccactctattccactccaatccgttccagtccattcttttcactccaatccattcctttccactgcagtatattccactctattctattccaatccattcaattccattcttt

SEQ ID NO: 253 - DNA, 213 bp, Protomyxzoa rheumatica
cattccattttgttccattccattctgttccataccattccactccattccattccactccaccccattccaattccacaccatttcactcctttccactcaattccactccactccactcctctccactccattccactcccatcaactccaatcttcaccagtccactcctttccattccactccttgccatttctttccattccactcca

SEQ ID NO: 254 - DNA, 170 bp, Protomyxzoa rheumatica
tggagtagaatggagtggagtgcactggagtgaagtgtagtggaatggaagggagttgaattgagtggagtggagaggagtggagtcgaatggaatggagaggagttgaatggaatggagtgtaattgaatggaatggaatggagtagagtgaagtgcagtggagtggag

SEQ ID NO: 255 - DNA, 299 bp, Protomyxzoa rheumatica
cattccattccattccattcgatcccattccaatccattccattctattagggtccattccattctgttccattcaagtcttttccattccaatccattccaatcaattccattcaattccattccatttcattcgagtccgtttcatttcattccattcgagtccattgcattccattccattagagtccattccattaaacccattctattccacttgagtccattccattccattccattccattcgagtccattctgtttcattccattccattccattccattccattccattc

SEQ ID NO: 256 - DNA, 150 bp, Protomyxzoa rheumatica
gaatggagtggaatggaatggagtggagtggagtggaatcgagtggagtgtagtggaaaggaatagaatgttgtagagtggagagaggtggagtcgagtggagtggagtgcagtggggtggaatggaatggaggggtgtggagtggagtg

SEQ ID NO: 257 - DNA, 127 bp, Protomyxzoa rheumatica
tcgactcctctccattccactcctccattccactctattcctttccattccactcaactccattccattccaatccactccactctcttccactccagtccattccattcctctccactccattcca

SEQ ID NO: 258 - DNA, 132 bp, Protomyxzoa rheumatica
tgggtgtatgtgagtgtgtgttggagtatgtgtgcgtttgtgtgtgggtgtattgtgaatgtgtgttggtatatgtgtgaatttgtgtggggatgtatgagtgtgtttggggggcatgagtgtgtgtgtgta

SEQ ID NO: 259 - DNA, 141 bp, Protomyxzoa rheumatica
gtgatggaaggccatctccgtgagaccttcggccccgccaacggcgcgcatggggaaaatggagccagcccattcgacgacgacatggagggtataatgcggatattgcgaacctatcttaagtaggtcttagaaaccgca

SEQ ID NO: 260 - DNA, 160 bp, Protomyxzoa rheumatica
caatccattctgctccactccattgcattccactgcactccattccaccccactccattatattccactcccctccattctactccactccattccattccaatccattcaaatgcatttttttccactccactccgttccaatccaatgcactctcttc

SEQ ID NO: 261 - DNA, 250 bp, Protomyxzoa rheumatica
gcacttgaaaggaatttaatggacgtgaatggaatgggctggaaaggaatggacaaaaatggaatggaatgcaaatgactcaaatggaagagaatggaacggaatggactcggaaggaatggaatcgaatagaagggaaaacaatggaatggaacggaatggactagattagaatggaaaggaaaggacttgattggaatggaatggaagggaatggactcgaatggaatggaatggaatggactcaaat

SEQ ID NO: 262 - DNA, 166 bp, Protomyxzoa rheumatica
tccgttcgattccattccattcaattccatttcatttgagtcctttccattccagtgcattacattcgagcccactccattgcattcaatttcattccgttccattccattcaattcctttccattccattgtgttccattcgattccattccattcaattccatt

SEQ ID NO: 263 - DNA, 204 bp, Protomyxzoa rheumatica
ttccatttgataccattacattagaatctattccattagagcccattccattcgaatgcattccattccattccattccatgccattcgattcgattctattctattcgactccattccatttcattcggttccatctgattccactccattcttgccctttccataccattccattccattggtttccattccattggagtcc

SEQ ID NO: 264 - DNA, 500 bp, Protomyxzoa rheumatica
ggattggaatggagttgaatggaatggaatgaaatggaatggagtggagaggtatggactggaggggagtagattgaagtggagaggaatggagtggaattgtgtggaatggagtggaatataatggaatcgattggagtggtatggaaaggggtggagtggaatggaatggagtggagtggaatgtaatggacaggaatgatatggagagaaatggagttgagtggaatggaaagtaatggagtgaaatggcatggaatggaatcgagtggagttgaatggaatggaatggagtggaattgagaggagtggagtggagtggaatggattgcactggaatggaagggaattctcttgaatggaataaaatggaatggaatggagtggaatggaatggataggaatgaagtgcagttgtgaggaatggaatggaatggagtgcaacggattggagtggaatgaggtggaatgaaattaattagagtggaatggattggaat

SEQ ID NO: 265 - DNA, 226 bp, Protomyxzoa rheumatica
cattccactccattccatttctttatattccattccattccgttccattccattccaatacactcctttccgttctgttcctctacattccattccaatccactccacttcacttcattttactccattacattccaatccactccattcctcaccatgccatatcattccattccattccattccactccactcaactccgttacactccactccattcaaatcc

SEQ ID NO: 266 - DNA, 129 bp, Protomyxzoa rheumatica
tccactccattccattcctttccactccactgcattccattccaatcaatgcctctccattccctttctttcacttccatcccattccaagtcattccattccaatccactcgactgcattccattcca

SEQ ID NO: 267 - DNA, 1019 bp, Protomyxzoa rheumatica
ttccattccattcctctacttctcattcaactccactccattccattccattacacacaactccattcaaatacactcaattccactcaactccaattcattacattccatcccactccgttccattccattccactccattccattgtactccactcctttccactccattccattcaatacaactctctccaatccactccactccactcggttccactccgctctattcaattccactacactccattccattctacactctccaatccattccactgcattctacaccattctattccactccattccactgcactccactccagtccactccactccactccattccattacactccattccattccgttccactcctttccattttattccgctccactgcattccattccactttattcatctcaaatccattcctcttctttccattccttccactccactccattccattccattccactctgttacattccattccattccgctttccaatccattgcattccactccattccattccattccattacattccacttcaatccattctattccattgcactccactccactccattccattccattcgagtacattccactccactccacttcaatccactccagcctactccattccactccactccattccactcaactccaatccaatcctttcttttccaatcgaatccattccacttcactccattccattccactctacgccattccattacattcccatctgttccattccatttcactcaatcccattccagttgactcctttccattccattccattcctctcctctccataccgttccactccactccactacactcagttgcactccactccactccattccattccaccccagtccactccactccactccattccactttaatccattccaatccattccacccaactcgattccacactattccactctggtccattcaattccattccactaca

SEQ ID NO: 268 - DNA, 127 bp, Protomyxzoa rheumatica
cctctggttgattccattccattccattctacttcattccatgccattccattccttttcattctattccagttgagtttattccattctattccactccatggcattccgttccatgccactcctt

SEQ ID NO: 269 - DNA, 159 bp, Protomyxzoa rheumatica
atttgattttttcaaaataaaaattaaaaacaaaaattatgttaataaattaagcattattttcattatactctttttattttactaattttctttatcaataattactactctataatgactaattttttttttgttgtagttgtttgctacctaacc

SEQ ID NO: 270 - DNA, 400 bp, Protomyxzoa rheumatica
cattccattcgagtcctttccattccattccagtccattgcattcgggtccattccaatccattccattctattgcattccactgtattgaatttcattccagtcctttccattccactcgagtcctatccattccattccattccattagagtccattctattcaattccaatccattggttttcattccattccgttagcgtccattctattcaattccattccattcgttttctttccattccattccgttccattccattccattccattcgaatccattccattgtattccatcaattccattcaattccagtccattcgggtcccttcctttctatttcatttgggtacattccattgcattccttttctttcgagtccattcctttccatttc

SEQ ID NO: 271 - DNA, 271 bp, Protomyxzoa rheumatica
ttccattcaactctcttcctctccattccactccacaccactctaatccattccattcaactcccttgcactccagtacactccacaccactcaactccattccattcaatcccattcaattccattccattccactatacttcactccactaccctccacgccattcaattccactggaaaccattccattccactccactctactcctctccactccactccattccattacattcgacttcattcctttcaattccactccactccac

SEQ ID NO: 272 - DNA, 198 bp, Protomyxzoa rheumatica
aattaaatgaaatggaatggaatggattggtttggagtggaatgaagtggaatggaatggagtgtagtggaattgaatggaatggagtggtgcagaaaggaattgaatggaatggaatgcaatggaatggagtagagtggaatggaactgaaaggagttaagtgaatggaatggagtggatagtagaggagtggtgtg

SEQ ID NO: 273 - DNA, 152 bp, Protomyxzoa rheumatica
aatggagtggagtggcgtggagtggattggaatggaatggaaccgaatggaatagataggaaaggaatggaacggaaagaaatggagtagagtggagtgcagtggagtggagtggagtgaagtggagtggaatcgagtggaatggagtggaa

SEQ ID NO: 274 - DNA, 185 bp, Protomyxzoa rheumatica
attcccctccattccattccattccacaccactccattccattccattccaccccattccatttcattccactccattctattccatgccactagattccattatatttcactccactgcactgcaatacattccactccactccattcctttccactacaatccactccactccactccattcc

SEQ ID NO: 275 - DNA, 131 bp, Protomyxzoa rheumatica
ttatgtggtacttatttgtttttaaaaaaaaagtttagtactaaattgttcgatttcgaaagttaaatatatttttgaaagttataaaggaagaaaggatttcttagcaaatttccgttatttaagttgga

SEQ ID NO: 276 - DNA, 164 bp, Protomyxzoa rheumatica
gaatggaatggaaggcattggactcaaatggaatggaacagacacgaaaggaattggaatgcatggacacgaatgtaatggaatgaattggaatcgagtcgaggagaatggaatggaaaggaatggatttgaatgcaatggaatgcagtggaatggactcgaat

SEQ ID NO: 277 - DNA, 131 bp, Protomyxzoa rheumatica
tcccaaattgtactttaaatactgtaaataaaatatcaaagtacagaaactgaatattataaactgtacataaaataccaaagtacacagactatattttatataccgcacataataaaacaaagtaccca

SEQ ID NO: 278 - DNA, 288 bp, Protomyxzoa rheumatica
attccattccattccattccactccactccataccattctatagtaagctattccattctattccatttcattacattccattacattccactatgctcttctccactccagtcaacacctcagcattccatcccattcccttccattccactccactccattccattctattccattccattccattccactccacattattcaattccataccactccactccgctccactccaatccactccattccattccattccattacattccgttccattacattccgtt

SEQ ID NO: 279 - DNA, 128 bp, Protomyxzoa rheumatica
actacaatggaatggaatggaatttactcgaaaggaatagaaaggaatggactcaaatggaatggaatggaaaggaatcgaactgaatggagtggaaaggactaatggaatggaacggaatggaatgg

SEQ ID NO: 280 - DNA, 622 bp, Protomyxzoa rheumatica
cattccatttcattccattccattccattccattccactattctctcctccactccagtccacacctccccattccatcccattccactccactccattccattcttttccattccattccattccactccattttattcaattccataccactccactccactccaatccactccattccgttccgttccgttccattccattccattccattccatgcctttccattactttccattcaattccactccaatccattccattccattccattcgtttccattcttttccattttactccattccattccattcacttccattccattccaatcaattccattccattccattccaatcaactccattccattacattcccctccactcatttccgttccattacactccactacattccagtcctttccactccagtacactccacaccattccataacactcgactccactccattccattccactccattccattccgctccattctgttgcactccactccattccattccactcaatttcactctattctattccactcctctccactccctccaatccattccattccattccactccactccactccattccat

SEQ ID NO: 281 - DNA, 182 bp, Protomyxzoa rheumatica
attggagtggaatggaatggagtggagtgaagtggagcggaatggagtgactggaaaagaatttaatggaattgaattaaatggagtggagtggaattgagtggagtggagtagaatggaatggaatggcatggattggaacggagttgagtggaatggaatggaatggaatggaatggaat

SEQ ID NO: 282 - DNA, 233 bp, Protomyxzoa rheumatica
cagattcaagaagctaagtgaatcccatacaaggtaaattcaaagcaatcctctccgtgacacatgataagtgaacttctaaaaatgaaagacaaagaaagacatcttaaaggcaaccagagagaaatgatgcattatctatagcaaaaaaaaaaaacaaaacttattcaaataagagtgaaattccaatttgaccatgaaggtctgaagaaaggggcacaatatttttaagt

SEQ ID NO: 283 - DNA, 318 bp, Protomyxzoa rheumatica
cagtcctgcatgacttaattatgcgcaagccaatatttgcagacgtcagtgagccatacgctcgattggtcaacgctgttcagcaaagcgtcccggaaattcagaacagtgcaacgccccattatttggttgaactagctcgttgctgcttaatcaaatcctggcagattcgactaaagctggtaaactggcactccttcgaagaaccgataaacgagaataagatcaattcgaagaaacaacgagttaccaatcgaactattctagcgaaatcgcttcattgtcagaacgccaagactcaagaggccgcatcaacag

SEQ ID NO: 284 - DNA, 164 bp, Protomyxzoa rheumatica
tgtgtgtgtgagcgtgggtgtgtgtgaagatgtatatgtttgtgtgtgtggtgtatatggatgtgtgtgaatgtgtatatgaatatgtgtgtgtgtatgtgagtgtcactgtgtgaagatgtatatgaatgtgtgtgtgggcgtgtgtgtgtgagaatgtgtat

SEQ ID NO: 285 - DNA, 149 bp, Protomyxzoa rheumatica
gcattccattcctttcctttacattgaattcaattctattccactcctttccattccattccattccactcgaccccactccactccactcgattccattccattccattctaatcctctccactcaattccattccactctgcaacac

SEQ ID NO: 286 - DNA, 189 bp, Protomyxzoa rheumatica
tgtcctgtctgtcccaaccctttccatttgcgtccatttaattgtattcaattccatttgggtacattccattctattacatgcaagtccattccattccgtttcattggattccattccattagaatccattccattaaatttcgttccattccattcgagtccattccattccattccattcgaatc

SEQ ID NO: 287 - DNA, 123 bp, Protomyxzoa rheumatica
aatggaaaggactcaaatggaatggaatggaaaggaaacgactcaagtggaatggaatggaacggaatgtactcgaatttcatgtaatggaattgaatggatgtgaatggaatggaatggaat

SEQ ID NO: 288 - DNA, 504 bp, Protomyxzoa rheumatica
gagtggattggagtggagtggaattgaatggactggagtgggatgtactgtaaggcaatggagtggactggaatggaatggagggggtggagtagagtggaattggtggagtggtatggagtggaatggagtggaatggaatgaagtgaagtagaatggaatggagtggagtggaatggaacggagtggagtagaatagaatggagtggagtggagtggataggaatggaatgtagtggagtggattagagtgtagtggagtggagttgaatggaatggaatggaatcgagtggagtggagtggaaacgaatggagtggagtggaattgagtggagtagcgtggaatagagtggaatggaaaggattggattgcaatggaatgtagtgcagtagagtggagtggaaaggactggagtggagaagaagggaatggaatggaaaggagtagaccggaatggaatgaagtggagtggagtagaggaaagtggacaggactggagtgg

SEQ ID NO: 289 - DNA, 194 bp, Protomyxzoa rheumatica
attccattccattccattccattccaatcaattccattcccttctactgcaatccactccactccactccagtacacccctctccattgcattccattccactccattccattccattcctctccattccactccattttattctactcgaatgcattcctatcaactccattccaatccactccattccactc

SEQ ID NO: 290 - DNA, 168 bp, Protomyxzoa rheumatica
gtggagtggattggaatggaatagggtcgaatggaatagagggtaattgactggaatggagtggaatggaatacagtggaatggaataaaatggactggataggaacggaatggaatgaagtggaatggaatggagacgagtggagaggaatggaatggagaggagta

SEQ ID NO: 291 - DNA, 175 bp, Protomyxzoa rheumatica
gtaatcaaaagaaatgaatagaatgcaatggaatggaatagaatggaatgcaatagaatggaccagagtggaatcgcgtagaatgtaattgaatggaatgcaatcgaagggaatggaatggaacaaaatggcatcgaacggattggaatggaatggaatggaatggaatggaatg

SEQ ID NO: 292 - DNA, 282 bp, Protomyxzoa rheumatica
ttccattcgattccattttttccattcgattctatttgattcctttttattccatttgattccattccattcaatttgaatagattccattccatttgattccattggattccattccattccactccattcaattccatgcaattccattccactccacaccactccactccgctccattccatttcactccattccataccactctattccacatcattcaattccactccattccacttcactcctttccactccactccagtccactccaatccactc

SEQ ID NO: 293 - DNA, 125 bp, Protomyxzoa rheumatica
ttatgtacagtataaaatatgaatctggtgtactttttgatattttatgtacagtatatactatgtattttgtatacatttgcatattttttgtacagtatataatatgtatttggtgtacttta

SEQ ID NO: 294 - DNA, 141 bp, Protomyxzoa rheumatica
aagaaaggagaaaagaaagaagaaaagaaaagaaagaaggaaggaagaagagagaaagaaagagacgagaggaaagaaagaatgaaagaaagaaagagagaaggaaagaaagagagaaagagagagggaaggaaggaagga

SEQ ID NO: 295 - DNA, 420 bp, Protomyxzoa rheumatica
cggaatggaatgtgtaaatgaaatgtgagctaagatagtgccactggactcctgtctgggtgaaagagggagaaacagtcgaaataaaggaatggaatggaatggagtggaatgaaatggaaaggagtggagaggaatagaatagagtggaatggtgtggagtgtagtggaatggtgtggagtgtagtggaatggagtggagtggagtggcatggaatggaatggaatgaagtggaaaggagtgaaatggagtggaatggaacagaatggaacggaacacaacagaacagagtggaacagagtagagtggagtgcagtggatttgtttggagtgcatcgaagtgcaaggaatggaatgcaatgtaatggaatggagtggagtggaatagagtggagtggaatggagtggagtggaatgga

SEQ ID NO: 296 - DNA, 302 bp, Protomyxzoa rheumatica
ttccattccattccattccattccgttccattccattccaagcgtgttgattccattccattgcattccattccgttgcattccattcccttcctttccattccattctgttccattccattccattgcattccattcgtgttgattccattccattccattccatttcattccgttccattccattaaattacactcagtaggattccgtttcattccattccatccccttccactccattccattccattcctgttcataccattccattccattccattccattccattccattccttt

SEQ ID NO: 297 - DNA, 150 bp, Protomyxzoa rheumatica
ataggaccagcgggatcgggaaagaccaatctactaattcttcgaggatcgtatctctatcgcgccggaattcgaaacatcgcaatcctgacctttggaagagtgctaaaggaattcctggtcgcgggtgcgtcgaactacgattttcct

SEQ ID NO: 298 - DNA, 193 bp, Protomyxzoa rheumatica
cgactgtcgccaaccacaaagacctgctttgcaaactgccgcagaaggtcaatctcgtcttttgaatagtcctgcccctcgtcgatcagaatgcaatcaagaatgttcaccggatcatgagcttcggctaactctcgaagggtagctctaagtcgttcgcgaatatcctcgaatttgcctgtcccatcgaagg

SEQ ID NO: 299 - DNA, 340 bp, Protomyxzoa rheumatica
ggagtggagtggaatggaatagactggattattgtggagggtaatggaatgaaattaagtggagtggaatggaatggagtggattgcaatggagtggaatggaatggagtggaaaagaagggagtgaaatagagtggaatcgagtggagaagactggaattgatttgaaaggaatggagtggaatgcagtgaagtggaatggtatgtattggaatggagtggagtggaattgagtggaatggactggagtggaatggaagttaacggaatggaatagaatggaatggaatggagttgagtggaatggaacggagtggagtggaatggaatggaatggagt

SEQ ID NO: 300 - DNA, 402 bp, Protomyxzoa rheumatica
cattccattccattccattcctctccatcccattccattccactcaactccattccactccattacattccaagcaatccactccattacatttcacacaccattccattcgcctccattgcattgcaatccacgccactccattccactccacttcattccattccactcaactccattctattcttttccacggcattccattccattacactccactccattccctgtccttccactacattccgttaaactctactgcattccataccattccacaccactccattccactctattccattccaatgcactgcactccattctattcctcaccattccattccactccattccaatccactccattccattccattccactccactccgttccattcc

SEQ ID NO: 301 - DNA, 211 bp, Protomyxzoa rheumatica
cgcttctggcgaaatctcgttaccatcttctattcttttccaaagtgttgagcgcttgaccacgaagaagggcgcctcacacctcagcgccatatcttccaaaatatccaggaactttcgaacttcatcaaaagtgccaccagtttcatcagcccaagcaacccagaactcgtcaggccacgggctggtgtctgttgccaaaggctgcgat

SEQ ID NO: 302 - DNA, 134 bp, Protomyxzoa rheumatica
gacgcctgttggggagcgcccgagggctcggagcaaggcgacaagctggatgtactgatcgcgctggtcgatatctacgaggccaagcgttggccgctgacgatcgatgacagcttcgatccggtcgatgttct

SEQ ID NO: 303 - DNA, 122 bp, Protomyxzoa rheumatica
tgtccattccactccaatccattgcattccattccatttgactaaattccatttgactccattccattcgaatcaaatacatcggaatacattacattcgagtccgttctattcaagtccat

SEQ ID NO: 304 - DNA, 131 bp, Protomyxzoa rheumatica
ggaatggaatggaatggaatggaattgaatgtaatggaattgaatggaatgcaataaaatggaaaggaatcatctcgagaggaatggaatggaatatagtggaatggaatggaatgaaatagaatggaatg

SEQ ID NO: 305 - DNA, 157 bp, Protomyxzoa rheumatica
cactccagtgcactccattccattccattccattccactccactcaactccatttcactccattccattccaatccactcacctcctttccaatctattccattccacccctctcaactccattccactccattcctttccaacctattccattcca

SEQ ID NO: 306 - DNA, 150 bp, Protomyxzoa rheumatica
tgtcactgtgcccccataggctgatccaagagaagagtccatcacatggctgatcagtgcagaaatttgccacaatgccgccactgggcagatatagacaattattacaacacctgtgtgatcacttcagagatatgtcaaaatgcccct

SEQ ID NO: 307 - DNA, 171 bp, Protomyxzoa rheumatica
cgaatggagtggaatggaaaggaacggaatgaagtggaatggaatggacagaaatggagtggagtgcaatggaatgaaatggattggaatggaatgcagtggaatgtaatgtaaaagaggtgaatggagatgaattgaattgagtgtgatgcagtggaatggagtggagtg

SEQ ID NO: 308 - DNA, 738 bp, Protomyxzoa rheumatica
tggagtggaatggaatggagtggagtggaatggaatggaacgaaatggagggcactggttttgaatggaatggaatggtgtggaatggaaagcaatggaatggaatggaacggaaaggagaggagggtagcatagtggaatggaatgaaatggaatacaatggaatggaaaggaaaggaatggaatgctatggaatggagtggactggaatggaatggagtggaggggagtggaatggtttggaatggattggaatggaatggaagtgaatggaatggaatggaagggaatagaatgcaatggaatggagtgcagtggaatggaatggagaggagtggaaaagaatggaattgaatggagaagagttgaatggaatagattggagtggaatataaaagaatggaatggaatggaatggaatgcaatggaattgaatggagtgcagtggagtggagtggattagtgtagaatggaattgaatggaacggaatggaatacaatagaatggattagaatggaatggaatggaatgcaatggagtggaatggagaggagtggagtggaatgaaatggaattaagaggagtggaatgaaatggactggaatggaatatattggaatggagtggagtggactggaatggaatagagtagaatgaagcaaagtggaatggagtggagtggaatggcatgacatggaatggaatggaatggagtggagtggagtggaatggaatgg

SEQ ID NO: 309 - DNA, 1181 bp, Protomyxzoa rheumatica
aatggaatggaatggaatggaatggatttgaacggaatagaatggaaaggaaaggaatggaatggactggaatggaatggactggaatgaattggaatggaatggaatggaatggaatgaagtggaatggatttgaacggaatggaatgcaaaggaaaggaatggaatggactggaattgaatggattggaatgaattggaattgaatggaatggaattgaatggagtggaatgcaatggaatagactggaatggaatggactctaatggaatggagtgtaatagaacggtcccaaatggaatctaatcgaatggaatggaatcgaatggaatggaaaggaatagaatggaatcgaatggaatggactcgaatgaaatgtactggaatggaatggactcgaatggaatggactgaaatggaacagattcaaagggaatggaattgaatggaagggactcgaatggaataaaatggaatggaatggaatggacacgaatagaatggattctaatagaatggactggaatggaatggattaaattggatggactcgaatggaatgtaatcgaatggaatggaatcgaacgggacagaatcgaatggaatagaatcgaatggaaaggaatcgaatggaatggactggaaggaaatggaattgataagaatggactcgaatggaatggactcaaaaggaaaggaattgaatgaaatggaattgaatggaatggaatcgaatttaatggaatggaatcgaatggaatgcaatcgaatggaatgcaatggaatggaatgaaatggaatggaatcaaaaggaatgaaatcgagtggaagtcttgaatggaatggaatctaatggaatgaaatggaatggaatggactcgaatggaatgcactggaatagaatggactcgaatggaatggactcgaatagaatggactaaaaaggaaaggaatcgaaaggaatggaatcgatggcaatagaatcgaatggaatggaatagaaaggaatgcaatcgaatggaatggaatggtgtggaatggaatggaatggaatcgaatggaatgtaattgagtggaatggagataaatggcaaagaatctaatggattgtaatctaatggaatggaatcggacagaatggaatggaatggaatggaatagaatggaatgaaatggaatg

SEQ ID NO: 310 - DNA, 145 bp, Protomyxzoa rheumatica
ttccattcgattgcattccattcgattccattccattaaactagatttcattccattctattccattctattcaattcctttcctttcgagtcctttccattcgagtccattctaattaattccatttccttcctgtccattcca

SEQ ID NO: 311 - DNA, 162 bp, Protomyxzoa rheumatica
atggaggggaatggagtggagaggaatggagtggaaaagaatgcagtggagtggaatgaaacggagaggagtggaatggaatggaatggagtttaatggaatggatttgagtggagtggactggagttgattggagtggaatggagtggaatggaatggaat

SEQ ID NO: 312 - DNA, 126 bp, Protomyxzoa rheumatica
ccgtaaaaccacgttttcctgccaaaaccgtaaaaaatgttttcctgccaaaatcacaaaaagtgtttttcaccaaaatttaaaatcacgttttcctgtcaaaatcacaaaaaagtgttttttcac

SEQ ID NO: 313 - DNA, 180 bp, Protomyxzoa rheumatica
ctggcatggaattgagtggaatgggatggagtggattggaatgaaatagggttgaatggagtggagtggagtggaataagatggagaggattggagtggaatggagttgagtggagtgaaatggagtggagttgagtggaaaggactggagggaattggaaaggaagggagtggagtgga

SEQ ID NO: 314 - DNA, 164 bp, Protomyxzoa rheumatica
catctcatatttccctgcgtcttttaaccaaatatatgaagttgtgaacacaaaactgtcaactgagctagctgtctccctctaacaagatcagtcccaattatgccagctgccaggagggtgctgagagctgcgttcctctgagatcctgtctcctgcggtga

SEQ ID NO: 315 - DNA, 158 bp, Protomyxzoa rheumatica
cattccattccactccattcctttctattccaatccactccactacactccattcctctccactccgttgctctccactccactccattccacgtcactccaatacattctactccaatccattccattccattccattgcattccactcctctccac

SEQ ID NO: 316 - DNA, 136 bp, Protomyxzoa rheumatica
aactccactccactacactctcttccattccattccgttacattacactacattacattccactgtgctccgatacactcatctcagttccactccactcaactccactacactctgttccaatctgttccattcc

SEQ ID NO: 317 - DNA, 213 bp, Protomyxzoa rheumatica
ggttctgttccattccaatccacttcacgccactccactccatttcatctatttcactccactccactccattccactccactacattgcattccacttcattccattccattccactccactccattccattccattccgttccaatccattccactgcactctgatccactgccatcaactccactccacttcactccactccgttgcatt

SEQ ID NO: 318 - DNA, 135 bp, Protomyxzoa rheumatica
tcccatttaaattattaatgacccatttagacccatataacataatataattaataattatttaaatacaaatttttatgaatgaatggatatattgttttagcaaaaaaaaaaaattcgcgagaaaatacggat

SEQ ID NO: 319 - DNA, 146 bp, Protomyxzoa rheumatica
caaagtaacatactcgaatggaaaggaatagaatggattggaatggaatggaaaaaaatggaataaaatggactcgaatgtaatggactccattggaatggactgcaatggaatgaaataaaatggaatggaatggaatcgaatgg

SEQ ID NO: 320 - DNA, 268 bp, Protomyxzoa rheumatica
tggaatgaattggaatggaatggagtcaaaaggaagggaaacatatgttatggaattgaattgatatgaaacgaatagaatggaatggagtgtaatggaaagatgtggaatggaatggaatggactcgaatggaatggaccagaataaaatggactcgaatggattagaaaagaatggaatggaatggaatgcaaccgaatgtaatggaaaggaacagaatggaatggaatcagatggaatggaatggaagggattggagtcgaacag

SEQ ID NO: 321 - DNA, 204 bp, Protomyxzoa rheumatica
attccattccattccactccattccattcaataccattccatttcgttcgtttctgttccattccattccatttcattcgtttccattccattcgattccatttcactccagtccattccattctatgccattccaatcgagtccattccattccattccaatcgatcccattacttttgattctattctgttcgactccaatc

SEQ ID NO: 322 - DNA, 122 bp, Protomyxzoa rheumatica
gaatggaatgcaatggaatgaaatggaatggaatggaatacaattgattggaatggaatgcaatggaatagaatgcaaggcaatgtaaagttgatatatagtgtgagctgagattgtgccac

SEQ ID NO: 323 - DNA, 128 bp, Protomyxzoa rheumatica
agagatatgtcataaatcccactgtttgccaagcctagacaagttgtacatcacctcagcgatcagtgcagacatatgtcccaatgtccctctcggcaaagctcagacaagagtcacaactcctgggt

SEQ ID NO: 324 - DNA, 130 bp, Protomyxzoa rheumatica
ccattccattgcattccaatcccttccaatccaatctattccattcaattcctatccattccatttgattatattccattgatttgattccattctgtttgattccattccgtgaaatttcgttccattc

SEQ ID NO: 325 - DNA, 216 bp, Protomyxzoa rheumatica
aattctattccatttgagtccattaccttcgagtccattccattccattgcattccattcgatgccattctactcgattctattccatttaactccaattctttccattccgttccatccgattcctttctcttctattcctttccattctattcaattccattccattcattatatttccattacactccattccattctattccttttgattct

SEQ ID NO: 326 - DNA, 140 bp, Protomyxzoa rheumatica
aaaagaatggaatggaatcaagccgagtggaatggaatggaacggaatggaatggaatgcaatagcatggaatggaatggaatggaatataatggagtggaatggaatagaaaggcattgaatcaacccgagtggaatgg

SEQ ID NO: 327 - DNA, 274 bp, Protomyxzoa rheumatica
gtgtgtgtgcatgtgcacatggtgtgtgtgcatggtgtgtgcatgtatacatggtgtgtgtgcagtctgtggtgtctgtggtgtctagggtgtgtgtgcctgtgcacatggtgtggtgtgtgcagtgtgtggtgtctgtgcagggtgtgtgtgcatgtgtacatggtgtgtgtgcagtgtgtgtgtatacatggtgtgctgtgtgcagtgtgtgtggtgtctgtgggtggtgtctgtgtggggtgtgtgcatgtgtacatggtgtgtgtgcagt

SEQ ID NO: 328 - DNA, 127 bp, Protomyxzoa rheumatica
cattccattccattccattccattccattcgtgttgattaacttcctttccattccattccatcccatcctattcctttccgttcccttccatttgtgttgattccattcctttccattccattcca

SEQ ID NO: 329 - DNA, 1305 bp, Protomyxzoa rheumatica
cactccattccattcctttccattccattccattccattgtattccattccattccattggagacctttccattccaattcgttcctttcgtttccatttgattcaattccattcctttagcttccattccattagtttctattccatttgaaggcatttcattctagtccattacattcgagtcgattcttttccattacagtccattcgattcgattccttttcattttattcgaatccaatccattcaattccattctattcaatttcattccattatagatggttccattctagtataatcctttcgtgtccattctattcccctttattcgattcaattccattcgattccattcctttcgattgcgttccattcgagtccattccattggagaccattccattcgagtccattccattccacaccattccattccattccattcgagaaatgtccattcaagttcatgccattcgtgtccattcaattcgattccattccattagaatctattccactagatatccttactttcgattccattccatttgagtgaattccatttcattccattaaattcgagtccattctattccattccagagcattcgattccattcgatttaattccattcgaatccgttctttcaagtccattcaattcgattccattccattcgagaccattccattctagtccattccttttgcttacattccattccactttactcgattccattccattcaattccattcctttcgattgcattccactcacagctccattccactccgttacattcctcttcaatatcctgctttccatttcacacaccattcaattccactccattccattcgactccacgccattcctttccactccacttctttccattccactcaactccattccattccattctacagcattccattcccttccactccactccatttcatgccaatccactgcattaccttaaattccactccattccaacccattccacaccactccattgcactctatttcattccaatccactccactccattccattccactacattccattcactctattcaattccactccatcccattccattcaattccactccacttcactccactccactacattccattccattccattccattttattccattcatttacgtaccactccactccactccattccattccacagcactccagcccattccattctattctactccattccacttcattccattccattccattccattccattccattccat

SEQ ID NO: 330 - DNA, 152 bp, Protomyxzoa rheumatica
accaatagtacaaggaaaacgaaatgaagaagatttgatcaccaattcaagaatagactagcaccaaaacgaatcaagcctttcatgaaacgtaattatatgcaacgatgctcataaaagtaaccacctttatagataatctaatgagatca

SEQ ID NO: 331 - DNA, 269 bp, Protomyxzoa rheumatica
ccattccattccattcctttccattccattccattccatttcattccaatccattccattccattacattctattccttgccattcaattgcattccattcaagtcagttacgttcgagttaattcctttccaggccatttcattggaatacattccgttccagtacgttacatttcattcgatgccattttattctagaacattccattccagtccagtccattcatttccattgcattccagtccattccattcgattccattccat

SEQ ID NO: 332 - DNA, 337 bp, Protomyxzoa rheumatica
tcctctccaatctactccgttacattccactccattccattccactccacttcattccattccattttactccattccactccactccacaacatttcactccactctacttatctccacaccactccaaacaattgcattccactccattccacttcactccatttcatttccttccattccaccgacaccattcgaagccactccattccaatgcattccactccacttctgtccactccattccatttcattccattccacccacaccacttgaatccattccattccattccgttccaatccactccattccactttattccattccactcca

SEQ ID NO: 333 - DNA, 169 bp, Protomyxzoa rheumatica
gtgtggaatggaatggaatggaatggagtgggattgagaggagtggagtggagtagaatggattgcactggaatggaatggaatggaattcagttgaatggaatagattggaatggaacggagttcaatggaatggagagtaatgaagtggagtggagaggagtggaat

SEQ ID NO: 334 - DNA, 214 bp, Protomyxzoa rheumatica
cattctattctattccattcgattccattccactggtttccactccattccattcaattgcattccattgcacaccattccattccatttgattacactccatttcaatccattccattcaaatcaatttcattgcaatcaattactttcgagtccgttctattcttgtccattccattcgattccattcctttcgattccattccatagcatt

SEQ ID NO: 335 - DNA, 199 bp, Protomyxzoa rheumatica
tatgttcaattccatttcattcgagtccattccattcgagtccatttcattcaggtccattgctttcctgtccattccattcgactccattccgttccagtccattctattcgagtccattacattccattcctttgcattctattccattccactccactccactcctttccactccactctgctccgttccattcct

SEQ ID NO: 336 - DNA, 130 bp, Protomyxzoa rheumatica
tccattcctctccattccattccactccattctctccaaacaatttggttccattccattccattccattccttcgagtccattccattctactcgagttcattctactccattccattagagtccattc

SEQ ID NO: 337 - DNA, 122 bp, Protomyxzoa rheumatica
cgctttgcacaaaaccaccgcttaaatctcgctggccccaagcgacgttcagctacaagagcaaaaccagacagcaggaagccctgtcttccgaagaaagggggttgggggaagcaaaaatg

SEQ ID NO: 338 - DNA, 137 bp, Protomyxzoa rheumatica
tttcagtccattccattagagtccattacatttcggtgcattcctttcaatcccattccattccattccattccattcaatgtcactccattcgattctattctattcgagtccattccattccattcgatgccatt

SEQ ID NO: 339 - DNA, 136 bp, Protomyxzoa rheumatica
tcattcttttctttcaattcgactccattccattccattccattccatttctttaaggtccattcccttcaattccaatcgactcaattccattccattcctttcgagttcattccattgcattccattgcattca

SEQ ID NO: 340 - DNA, 163 bp, Protomyxzoa rheumatica
gaatggaatggaatggagtggaatggaatggagtggaatgcaatggaatggagtggagtggaatggagctgagtggagtagagtggaatggaatggagaggcgtggagtggagtgcggtacagttagctgttatttaatagaatggaatggaacggaacagag

SEQ ID NO: 341 - DNA, 173 bp, Protomyxzoa rheumatica
gggttgattccattccattccattccattacattccgttcgattccattccattccattcgagtccattccattccaatccatttgagtgaattccttttcattccattccattcgtgtccattccgttccaaactttccattcgagtccattccattgcattccattccatt

SEQ ID NO: 342 - DNA, 200 bp, Protomyxzoa rheumatica
ccaaagatgatatgtaaatttgtgacacatttcctatttaaaaaaatagtattgaggtattaataacttaaaattgtattaaatattagtagttctgagactactgactcccccaggcatcttaccaaagaaatttctctctagggtaagataaaatcagctgaggagtcagcgatattataggtttaaaccatcatcaa

SEQ ID NO: 343 - DNA, 150 bp, Protomyxzoa rheumatica
ccactccattccattccattacattacattccttccaattccactgcattccactccactccaatgaactcctctgcactcaactacattcccctccattccattccattgcaatcgattccactccactccactccattccatcccatt

SEQ ID NO: 344 - DNA, 183 bp, Protomyxzoa rheumatica
cacatgtatacatgtatacatatgtacatatacatgtatacatatgaacacgtacatatatacatgtatatatgtatacatgcatgcacatatgcatgcacacatgcgtgcacacatgtatacatgcatgtgcatatacatgcctgcatgtgtgtacatgtatgtgtacaaatatacatatgc

SEQ ID NO: 345 - DNA, 146 bp, Protomyxzoa rheumatica
ggagtggagtgcaatggagtgtggtggaatgcaatggagtatagcggaatagaatggagtggagtggaatttactggaatggagtggaatggactggagtcaactggaatggagttgagtggagtggaatggagttgagtggagtg

SEQ ID NO: 346 - DNA, 154 bp, Protomyxzoa rheumatica
tattataatccatttgagtcgattccattcgagtccattccattccatcccattccagtctttccatttgatgccattccatacgactgcattccattcctttcagttctatacaattccattccattctattcctttccattccattccattc

SEQ ID NO: 347 - DNA, 155 bp, Protomyxzoa rheumatica
aatggaatggaatggaaagaaatggaatggatgggaatggactggaatagagtggagtggaatatactggaatggaatggaaggaatggaatggtatggaaaggaggggagtagagtggaatggaatggagtggaatggattggagtggaatgga

SEQ ID NO: 348 - DNA, 397 bp, Protomyxzoa rheumatica
gagtggagtggaatggagtgcattggagtggaatggaatgcagtgcattgtagtggaatggaatggagttgaatggagtggagtggaatggaatggaagggaatggaatggagtggaatggagtgcaaaggattggaatggagtggagtggaatgaaatggagtggagaagaatggaatggagtggaatggaatacaatggaatggagaggagtggcatgaaatgcaatggatttgaatggagtggagtgcaaaagagtggagtggagtggaatggagagagatgaatggaatggaatataatgcaatgtcaaggaatggaaaagaatggagtggagtgcactggagtagagtggactggagtggagtggaatggaatggaatggagtggagtggag

SEQ ID NO: 349 - DNA, 124 bp, Protomyxzoa rheumatica
ccccattccactccacttctctccattccacttcactccatgccactccacttctgtgcattccattcaattctactacattccagtacatgtcactcatttccactgctttccatttttgctt

SEQ ID NO: 350 - DNA, 145 bp, Protomyxzoa rheumatica
ttgaatggaatggaagggaatgaaatggaatgtagtggagtgaaatggaatggattggaggggaatggaatggagtgtagtggaattttgtggagacgagtggaatggagtggagtttaggagagtgaagtggagtggaatggag

SEQ ID NO: 351 - DNA, 718 bp, Protomyxzoa rheumatica
attccattccattccactgcactccattccattccattcccttccattccattaaattccactccattcctctccagttctctccactccactccactccattccattctgttcctttccattccaatccattttactccactccattctcttcttctccactccactcgattccatttctttcctttccattccattccattccatttgatttcattctagtctactccactccgttcccctcctctccattccattctattccacagaagtccactccaattctttccattccattccactccattccattccattccactccagtctattccttacattccattccattctactccattccactctattccattcaactccactatattccattccattccattcaactccacgacattgcattcccctccactccactccactctactgaattccattccactccattccattctgctccgttccactctattccactccattgcattcctctccactccacaccacttcactcctctccactccactcccttacattcaattctattccatttctttccattttattccaccccattccattccattccattccattcaactacattccacgaaacgccaccccactccactccactgaattccattcccgtacattctattccattccattccattccattccattccattc

SEQ ID NO: 352 - DNA, 588 bp, Protomyxzoa rheumatica
ttccactcgggttgattcctttccattccattccattccattccattccactcgcgttgattccattgcattccattctattccattccatttcattccactcgggttgattccaaaccattccactccaatccgttccattccattccattccaatctattccattcaatttaattgcattccattccattcctttccattccattacactcgagttaataccactccattccattccattccattccattccactctattcccttccatttcattccattcgattccatttcattccattccattccatttcactccattccactaggggtgatttcattatgttccatgccattcgaatccattccataactttccattccattgcattccaatcgggttgattccatccagttccagtccaatccattccattccgttccattcaaatctattccattccatttaattgcattctattccattccattccactcgtgtggattccattccattttattccattccattaaaatcggtttgagtccatttcactccattccattccattccattccattccattc

SEQ ID NO: 353 - DNA, 122 bp, Protomyxzoa rheumatica
ttgaatggaatgtcatagaaaggaatggaatggaatggaaggtaatgttatggactcaaaaggaattgattcgaatggaatagaatggcaaggaatagtattgaattgaatggaatggaatg

SEQ ID NO: 354 - DNA, 297 bp, Protomyxzoa rheumatica
acttgggttaactccaatccattttattccattccattccaatccattccactcgggttgattcaattccttctcattccattccattcctttccattccagttgtttcaattccaattcattccattcaattccattccattcctttccctaccactcgtgttgattcaattccattctgttccattccattccatttcattccattcaattcctttccattccactcgggttgattcctttccatccattccatgccatttcattccattccattcctttccattccattccatt

SEQ ID NO: 355 - DNA, 165 bp, Protomyxzoa rheumatica
aatggaatggaatagaatggaatggaatggaatggaagggaatcgatcagagtcgagttgaatgcagtggaatggaacggaatggaatggaatggaatgggatgcaatagtatggaaatgaatcaactggaatggagtggaattgaatggaatggaatggaatgg

SEQ ID NO: 356 - DNA, 179 bp, Protomyxzoa rheumatica
atggaatcatcatcgaatagaatctaagggaattatcgcctaaaggaatcgaatagaatcatcaatgaatggaatcgaatggagaaatcaaatggaatccattggaatcatcatagaatggaaccgaatgcagttatcatcaaatggagtcaaatgcaatcatcatcgagtggaatcaa

SEQ ID NO: 357 - DNA, 217 bp, Protomyxzoa rheumatica
aaacctcatgctcagtaccacccttctggttcgaatatcactctttataatccagtaaattataaattagaaagataaattatttgtcttctgctccacaccgaaaataaagtgctgaggcagaggcaggatatctgcattaaaatctctcttttggaaagaaaaagtgggaatacctaactgcaagtgattcataaaagtaatggaattctgctgg

SEQ ID NO: 358 - DNA, 192 bp, Protomyxzoa rheumatica
tgattccatttgattccatttgatgatgattccattcgattccattcgatgatgattccatttgattccattcaattatgtttccattcgacttctttcgatgattctattcaattcctttcgatgatgattcaattatattccatttgatgattcctttttattccattcgatgatgattccattagattc

SEQ ID NO: 359 - DNA, 132 bp, Protomyxzoa rheumatica
ttggatacctttccattccattccattccattcgagtccattccgttaaacttcattcgagttgtgtccattccattcgagtctatttcattccaatccatgccattcgagtccattccattccattccatt

SEQ ID NO: 360 - DNA, 342 bp, Protomyxzoa rheumatica
atggaattgaatgcagtggaatggaatggaatagtttggagtggagtggagtgaagtggagtagagtgcaatcgagaggaatggaaaaagatggaatggaatggaatgaagaggagtggagtggggtggagtggagtgcagtggtatggagcggaatggaatgggatggattggaatagagtggagtggagtgcagtggagtggagagggatggaatggagtggaatgggatctggtgtaatggaatgtagtgaagtgcaggggagtggagtggaacagagtggaatggaacggaattgaacggaatggaatagattggaaaggactggaatggaagggaat

SEQ ID NO: 361 - DNA, 194 bp, Protomyxzoa rheumatica
catcccattagagtccactccattccattgcattccatttgatatgtttccattacgctccattccattctattctattgaattccattccattccattccattcaattacattcctttcgatatgtttccattatgctccattccattttattccattcgattccattcaattccattccattatattccatt

SEQ ID NO: 362 - DNA, 146 bp, Protomyxzoa rheumatica
gaatggaatggaatcgaatggaatggaattgaatagaaaggaatcgaatggaaaggacatgaatggaatggaatggaatggaatcgaatggaatggaatcgaatgcaatggattggaatggaatggaatggaatggattggaatgg

SEQ ID NO: 363 - DNA, 173 bp, Protomyxzoa rheumatica
atggagtggagtgcagtggaatggagtggagtagaatgcagtggactaaaatggagtggaggagagtggaatgtaatgtaatggaatgcactggagtggagtggagtgaagtggaatgcaatggaatggggtggagtggagtgaagtggagaggagtggaatggaatggagtg

SEQ ID NO: 364 - DNA, 206 bp, Protomyxzoa rheumatica
aatggaatggaagggaatagaatggagtggaatggtgtggaagggaatggaatttaaaggatttgagtggattgtagtggagtggagtggaatggaattgtgtggaatggaatggattgcaatggaatggagtggaagggaatggagtggtgtggagtagaatggattggaattaaatgcaatggaatggaatggagtggaatgga

SEQ ID NO: 365 - DNA, 200 bp, Protomyxzoa rheumatica
cacgacatcttcatgaacaagtatcagttaatacttgtcttcaataacttccaaatgatttataaaacatagaagggataatattcagctggtacttgccagtataggtctaccagctgacttgctccaacatccattttgattagtccagtgccaaagccataatggttattaaatattttgaatatctgccatatagg

SEQ ID NO: 366 - DNA, 136 bp, Protomyxzoa rheumatica
gatgtgtattgtctgtgtgttgtgtgtctgtgttgtgtgatgtatgtggtgtgtttctgtgtattgtgtgtaatgtgtgttgtctgtgtgaagtgtgtgtgttgtgtgtctgtgtgttatgtgagttgtctgtgtg

SEQ ID NO: 367 - DNA, 131 bp, Protomyxzoa rheumatica
caccacacacatcacacaacagacacacaacacacacttcatacacacaacacagacaacacatatcacacacacaatacacagaaacgcacaccacacacatcacacaacagacacacaacacacacttc

SEQ ID NO: 368 - DNA, 125 bp, Protomyxzoa rheumatica
tgtatttattaatctatcaatgaggtattcatctttggctgactcttttctagaattcatgattacatcttccttctgtcaatacatttcccatagaaaagaatatagtatgattgaccaggccc

SEQ ID NO: 369 - DNA, 135 bp, Protomyxzoa rheumatica
actctcttaaaagtgtgctttcaaacaccatttcttttgtctagaatgacttttcctttcatctggcaagtttctgcttatcctcaaagaccgaatacctttctcggaaaagcttttctcaactgtagaggccaa

SEQ ID NO: 370 - DNA, 238 bp, Protomyxzoa rheumatica
attgaatggaatggagtggagtggagtggaatagagtggaacggaatatgatggagtggaatggaatggagtggagcggagtggagtagagtggagtggaatggaaagggatggaatgcaatggaatggggaggagcggagtggtggggagttgagtggagtggagtggggaggaatggaatggaatggaattcaatggagtggaatggaaagggatggaatggaatggaatggggag

SEQ ID NO: 371 - DNA, 128 bp, Protomyxzoa rheumatica
gcattgcattgcattgcattccattccattgtatttcattgcattccattgaattccattccattgaattccattgcattacattcaattgtattcctttcaattccattccatcccattccattcca

SEQ ID NO: 372 - DNA, 232 bp, Protomyxzoa rheumatica
attcctttcaattccattccatcccattccattccacttccgtgaactgcattccactccactccactgcattccattccattcaatttcattccactccacttcactgcattccattccattccatttcattccactccaattcactccactccacgccactccattccattccatccaattccattcaactgcattccactatacaccattccactccatgccactccac

SEQ ID NO: 373 - DNA, 779 bp, Protomyxzoa rheumatica
gaatggaatggaatggaatggaatggaatggattagaatgaaatggtatgtaatggaatgttacagaattgaatggagtggagtagaatggaatgaaatggaatggaaaggaatgatgacgaggggactggagtggagaagaatatagtggaacggaatggaatggaagggaatggaatggagagcaatggaattgaaaactatagaatggtatggatttgagtggaatggaatgttatctaatgcattggaatggagtggagtggagtggaatggaatgtaatccattgtaatggagtggaatggaatggaaatgaatggaacgcaatggaatggaatggggtggggtggagtagagtggactgaaatggaaaggagtggaatggaaaggagtggaaggaagtggagtggaacggaatggagtggactggaaacaaatggagtggaatggaatggtgtggaatggaatgcagttgtgtggaatgcaatggagtggagaggaatggactggagttgaatggaatggaatggagaggaatagaatggaaagctttggagtgcagtggagtagtgtggaatggaatagaatggagtagagtggaatggaatgaaatgcagtggaatggcatttaatggaatgcaatggaatgcagtggaatagaatggagtctaatggaatggaattcaatgtactggagtggaatggaatggaatgaaatggaatggagtggggtggagaggaatggaatggaatggagtggaatggaatggagtggaat

SEQ ID NO: 374 - DNA, 173 bp, Protomyxzoa rheumatica
ccattccattccattcgagtccatttcattcaattccattccgttccagtcatttcgattgcattcaattccatttcatttcactctgttagtgtccactccattcaattccataagagtcctttgcattccattctattccatttgagttcaatacattccattccattcga

SEQ ID NO: 375 - DNA, 401 bp, Protomyxzoa rheumatica
atggaatggaatggagtggaatggaatggaatggaatggaaagtaatggaatggaatgaaatgaaatggaatggaatggaatggaatttaaaggaaaggagtggaatggaatggagtagaatggagtgaagaggaatgcagtggagtgtagtggaaagcaatcgagtggaaaagaatggaatggagtggaatagattggaatggaatggaatggagtgtggtggaatggagtgtaatgaagtagaatgaatggaatggattggaatggaatggaattgaagggaatgaaatggagtggaatggtgtggaagggaatggaatggggtggaatggattagaatggggtggattgtagtggaatggaattgaatggagtggagtggaatggaatgaaatagaat

SEQ ID NO: 376 - DNA, 258 bp, Protomyxzoa rheumatica
caatgaaatggaatggaatggaatggaaaggaaaggaatggaacggaacgggccagaacagaatggaatggaacgaaatggaatggaatggaatggaatagagtggaaaggaatggaatgaaatggggtggaatatagaggagtggagtggaatggaatggaatgcagtggagtggaaaggaatggagcagaatttattggaatggaatgcaatgcaatggaaacgaatggaatggaatggggtggaatggggtagtg

SEQ ID NO: 377 - DNA, 179 bp, Protomyxzoa rheumatica
ctccactccattccattccattaaactacactgcatgccactccattctgttctactccaccctactccactccattccataccactccattccatcccactcaattccattccactccactacattcagttccattcaattccattccactccactccattccattccattccattcc

SEQ ID NO: 378 - DNA, 221 bp, Protomyxzoa rheumatica
aatggaatggaatggaatggaatcaaaccaactggaatgaaatggaaaggaatggataggaatcgaatggaagggaatggaatggaaggaacccgagtggaatgaaatggaatcaattggaatggaatggaatggattctatccgagtgcaatggaaccgaatgcaatggtatggattggaatggaataagcaagagtggaatcgaacggaatggaatgga

SEQ ID NO: 379 - DNA, 124 bp, Protomyxzoa rheumatica
attccattccattccattccattccattccattctattagtgtccattccactccggttcattccattagagtccatcacattctagtccattccactcgaatgcaatccataccagtccattc

SEQ ID NO: 380 - DNA, 390 bp, Protomyxzoa rheumatica
tggaacgtactcaaatggaatgaaatgcaatgcaatggaatggaatggaatataaagaaatgtacaagaatggaatggaatggaatggaataaattgaatgcaacgtaatggaatggaatggaaaagaatagaatcaaatagaatggaatggaatggattcgaatagaatgaaatggaatggaatggactcgaatggaatggaatggaaaggactcgaatggaatggaatggtctccaatggaattgaatggaatgaactggcctcgaatgcaatagaatggaatgaaaaccgctcgagtctaatggaatggaatggaataccatggaatggaatggaatggaattaaatggaatgaagtggcttagaatgcaatagaatggaatgcaat

SEQ ID NO: 381 - DNA, 159 bp, Protomyxzoa rheumatica
atggaagggaattgactggactggaatggaatggaatgaaatggactcgaatggaatggactcgaatgtaacggactgtactggaatgatctggaatggaatggactcgaatggaatggaatttaaaggaatggactcgaatggaaaggaattgaatag

SEQ ID NO: 382 - DNA, 161 bp, Protomyxzoa rheumatica
atggaattcaatagaatggaatggaatggaatcaactcgagaatatttgaatggattggaatggagtggagtggaatggaatgcattttaattgaatggacctaaaaagattggaatggaatggaatggaatggaatgaattgaactcgaatgcaatagaa

SEQ ID NO: 383 - DNA, 225 bp, Protomyxzoa rheumatica
ccattccattgcattccattctattctttcgagaccattcaatttgatttctttccattcgaatccgttgcatttcattccattctagtccattcctttgcattccattacattcgagtccattccattctcttccattctattccattcgagtccattctttgcattccattagattcctttcgattataattgactgatttaattccattccattctatttga

SEQ ID NO: 384 - DNA, 130 bp, Protomyxzoa rheumatica
tccattccattgcattccatttcgttccattccattctattccgtaagattccattccattccattccattccattccgtgccattccacacgaattgattcctttcctttccattccattcgggttgaa

SEQ ID NO: 385 - DNA, 213 bp, Protomyxzoa rheumatica
attctattccattcaagtctattccattccattccattagagtccattccattacattccattgtattccattcgagttcattccattccattccattcatgtctatttcattctattcgattgcattccattccaattctttcaagtccattccactccattcaattctattcattcaaatccattccattccataccataccattccggtc

SEQ ID NO: 386 - DNA, 135 bp, Protomyxzoa rheumatica
actccattccattccactccactccattccattccactcctatagattccgttatatttcactccattccacacgattccactgcacttttctccactccaatcctctcccttccagtccatacctctccactcc

SEQ ID NO: 387 - DNA, 185 bp, Protomyxzoa rheumatica
acttgaaattgtctatcagctaattgtatttttgaaaatgatgatgaactaaagacatttttaaaactatgattgatctttattaaaggaacttttatagggcacacactatgaagagagaagggattccagaaaaaaaggtctgagatgcaagaagaaatgtttagcacacaaaatggtaaatg

SEQ ID NO: 388 - DNA, 139 bp, Protomyxzoa rheumatica
aatagaatggaatagaatagaatgagaaagactggaaatgaatgtaatggagtggtgtagagtggagtggagctgagtggactggagtggagtggaattgagtggagaggattggaatggagtggaatggaatggaatg

SEQ ID NO: 389 - DNA, 149 bp, Protomyxzoa rheumatica
tgcaacctctagaggaatggaccggccaggaggtacggtggctctggtagcatttcatgaagcactatcatcatgtttgcatttttaaaagatgctctgcccatgctcccctccaatccacctcccactcagtagccaaagcctgtgaa

SEQ ID NO: 390 - DNA, 129 bp, Protomyxzoa rheumatica
aaactggcaaggagagcgaagggaccatgccggacttccccccttccctgcatgtttccgggtgaccaaagagctactggaggaaacaatcagaatgacacatctctgaactcatcaataaagtgatgt

SEQ ID NO: 391 - DNA, 278 bp, Protomyxzoa rheumatica
ccactccattccactccattccattccatgccactccattcctttccacttcactgtattccactccattctattccactccactccactccactgtcttccactgcattccatcccactccattccgttccactccaatccattcctttgaatttcattttattctattccaatccattccattccattccgctccactccactccactccatacaattccactccattccactccattccattccacttcattccattccactccactccattcca

SEQ ID NO: 392 - DNA, 212 bp, Protomyxzoa rheumatica
cgggttgattccattccattactttccattttattccattccattccgttctattccattccattccataccattccactcgggttcattccataccattccattccattccattccattccattcggttccattccattcatgttgattaacttccattcaattccattgatcccatccaattccattccgttccattccattcatgttga

SEQ ID NO: 393 - DNA, 128 bp, Protomyxzoa rheumatica
atattgtatcaccgaaataattcagatttgtttcatcgataaattaataatcagtttgtatgtaatgttttttttttatctatcgtggtgtcatactattcttatctatttgacatattgtatcacct

SEQ ID NO: 394 - DNA, 137 bp, Protomyxzoa rheumatica
ttccattccattccattccattctattccattccatttcacactactccattcctttccgctccattccaatccattccatgaaactccattcctttccactctcttggattccattcatctttactccattccttt

SEQ ID NO: 395 - DNA, 197 bp, Protomyxzoa rheumatica
tggaatgccatgaaatggagtggagtggaatggagtggagtggataggagtggaatggaatggagtggaaatgattggagaggattggtatgtagtggagtagaatgaaatggaattgaatggaatagagtggaacagaccagaatggaatgaagtggaatggaaggcagtggagtggaatggaatggaatagaatg

SEQ ID NO: 396 - DNA, 289 bp, Protomyxzoa rheumatica
ggaacagactcgaatgcaatagatgggaatttagtggaatggactctgatggaaaggaatggaatggaattgaatgtaatagaatggaatggaatggaaaggaatgtaatttaatagaatggaatggaatcaaatggaatggaatttaaaggacttcaatggaatgaaatgtactcaaattgaatgggatggaatggaaacgacttgagtagaatgaaatggaatggaatggaatcgaatgtaacggaatgggattgaatggactcgaatggaatgtaatggaatggaa

SEQ ID NO: 397 - DNA, 289 bp, Protomyxzoa rheumatica
cgtgcgtttcagtccgttggagtaggttgctgtcgcgtctttcatcgtgattggatcattgatcgaatacatcaatctggccgacttcggatgatggtgcctcggctatacggattggtcgaactcactggaattctcgacgggcgtgcatatcagcaggcccagttgatacttagtgagatgggagacaatttgcagaaacttgtggtaacggaagcgcaccgcaagagtgttcgtgcgattagtattcataatttggtgcttcttctggggtcgccagcggcaggaa

SEQ ID NO: 398 - DNA, 164 bp, Protomyxzoa rheumatica
tagcctcataggttggttgagcgcagtgtaatgcatcgcccatcgccgtaccagaagtgcagttcgaccgagccaaccgattgatcttgccttcagaaggcgttgccttcgtccggacgagaggcacgttgagcctccggactgctatcggaactctcaggcag

SEQ ID NO: 399 - DNA, 177 bp, Protomyxzoa rheumatica
cacggcgcgagattctatcgcatggatggccattagtaattgtcgaatactctggagcgatgaagtgctattgagcttcgcaaaatggtcgtcgaaagaatatgtcgttgcgcaagctcggggagagctaatcagcagaggagcaagagctgggcgcaagggtgagctgcctgagag

SEQ ID NO: 400 - DNA, 300 bp, Protomyxzoa rheumatica
ttccattcctttccactccatccactccattccactccaccccactgcactcctctccactccactcctctccactcgactctactccactctatttcacttatctcctttcagttccattcaactctactgtattctattcctttgcattccattccattccattccagtccactccatgacattccattccactcgactccattccattccacttcattccactccactccattccattccattccatttcatttcagtccattccattccattccattcctttcctttccattgcat

SEQ ID NO: 401 - DNA, 122 bp, Protomyxzoa rheumatica
gaattgagtggaatgaggttaaaaggagtggaatataatagaatggaacagaatgtaatgtagtggcatggagtgaagtggagtggattgcagtgctgtagaatggaatgcaatggaaagga

SEQ ID NO: 402 - DNA, 196 bp, Protomyxzoa rheumatica
gacagtagagaaatgccttcacaaccctggatgaaaactgttttctgctgggccttctacatctatcccaaatctcaaatttaaaagaagatagaaattaccttcagacataaaagttctcaaaaaatttacctcttatgtacatcttatcagaaagctacagaaggacgtgctccatcagaaagagggagtgaat

SEQ ID NO: 403 - DNA, 136 bp, Protomyxzoa rheumatica
ccattccattctattccatttgggttgattccaatccattgcattccattcaattccattcaactctggtagattccattcaattccgttggtttccattccattccatttcattccattcctctcaggttgattc

SEQ ID NO: 404 - DNA, 147 bp, Protomyxzoa rheumatica
atggaatggaatcgaatggaatggaagggaatggaatggaatggaatggaatgcatttaaaatgaatttatccgaaaagaagggaatggaatggaatggaatcaagtggccttgaatgcagtataatggaatggaaacaactcaagt

SEQ ID NO: 405 - DNA, 153 bp, Protomyxzoa rheumatica
tggaatggaatggaatggaatggaatgaaatccacccgagttgaatggaatagaaatgaaaggaatggaatggaaaggaatgggatggaatcaacccgaggggaatggaattgaatgcaatagaatctaactgaggggaatggaatggaatgg

SEQ ID NO: 406 - DNA, 330 bp, Protomyxzoa rheumatica
tccattccattccactacactccattccattcaactccatttcattacatagctttccactccattgcattcgattctattccattccaatcaattccacaccattctattccactccaatacattccactccactccactccaatcgacctcactccactacactccattcaatttcattccgttccattcctttccactccactccagtccattctattccattccattccactgaactccacttcattccactgaactccactcatttcccctccactccactccgttccattccattccactccattccattccactacactccat

SEQ ID NO: 407 - DNA, 190 bp, Protomyxzoa rheumatica
ccattctattccattctattgcattccattctatttgattacattccattcgattccaagccattcgaatcaattacatttcaatccattgcattggagtctgctgtattccagtccattccattcaattccattccatttgattccattccatactattgtattcctttcgattccattaaattcgaat

SEQ ID NO: 408 - DNA, 140 bp, Protomyxzoa rheumatica
aatacaatggaatggaaaggaatagactggaatggaaaaggatgcaaccaaaaggaatggaatgaaatggaatggagtcgaatgtaatagaattgaatggaatggcattgaatggaatacagtggaaaggattcgaatgg

SEQ ID NO: 409 - DNA, 281 bp, Protomyxzoa rheumatica
cattccactccactccatttcaatacatcccagtccattcgactccattccactccactcctttccactcttttccactccacttcactccattccaatccattccattccatcatattccattcaatttcactgcattcctttcgattccattccatgccattcctctctactccactccattgcattcaactccacttcattccattccatgacactacactccgttgcactccataccaatccattccactccattccattccattccactccattcc

SEQ ID NO: 410 - DNA, 278 bp, Protomyxzoa rheumatica
ggggtccgtctttgcgcgtaaggtcgctgaaaggctgactgagttgggatgggaaacggtagtagaaagaaaagttacggaaatattgcgggcgggtttcgatcgggattatggcgatgtcgatgtactcgcgtggaatgctccaagctgccgggttctagtgtgtgaatgtaaggatttgcagtatcggaagacggaaggcgagatagccgagcaacttatggactacagaggtgagatcaacgaaaggggcaaaagggacgatttgagaaagcact

SEQ ID NO: 411 - DNA, 574 bp, Protomyxzoa rheumatica
attccattccactccactccattccattccattccactccgctccaatccactccattccattcctctctattccattctattcctttggattccgctcctctgctctccactccactccattcctttccattccattccatgacattccaatccattcatttccatcccactccaatgcactactctacactccattccattccattccattccattcgattcctctcaaaaccattccactcctttccattccactccattccattccactcatatccaatccattccattccattcaattcgattccacttcattccattccactccattccattagactgaaatccaatccattactttccattccaattcactccactccactgctctccactccatttcattccattccactccagcacattacacttccttctacgaaactccaatccactccattccattccactccactggactccattctactccatacaattccagtccattccgttccactccactgcattccattccactccattccactccattccactccactgcagtc

SEQ ID NO: 412 - DNA, 506 bp, Protomyxzoa rheumatica
tgcagtggaacagaatggagtgcagtggcatggaatggaatgtagtgcagtggaacggaatgaaaacggatggaatggaatggagtggagtggagtagagtggaatggaaaggagtggagtcttgtggatttgagtgaagtggagtggaatggagtggaatggaatggaatggtgtggggcagaaggagtgaagtggaaaggaatggagtggagtggagtgaaatggtttggagccgagaagaatggaaaggagtggagtaaagtggaagaaaattgaatggagtggaatggagtggattggaatcgagtggaatggaccggagtggaatggaatgaagtggagaggattggaatggaatggaatgtagtggagtggattggaatgaaatggaattgaatggattggagtggagtggagaggactggaatggaatggaatggagtggagtggagaggagtgaagtggagtggaggatagtgggatggaatggaatggagtttagtg

SEQ ID NO: 413 - DNA, 213 bp, Protomyxzoa rheumatica
ctccactccgttcaattccattccttcccattccattccattccacgccactccactccattcaagtccattccaccccattgctttccactgcattccactacactacactccacttcatcacattccattcgatttcattctacaccattcgaatctttcgatttcattccattcgattccattagattccattttttttcatttgatacc

SEQ ID NO: 414 - DNA, 155 bp, Protomyxzoa rheumatica
ggaacggaatggaatgaaacggaagggaacggtatggactggtgtggagttgagtggaatgtatcagagtgcagtggaaagggatggaatggaattgaattcaattgaatggaatggagtggagtgaaatggaatggaattgaatggaatgcaat

SEQ ID NO: 415 - DNA, 144 bp, Protomyxzoa rheumatica
attcaaatttccccattgtctcaatagtttttctggtcattttaacatttatatgggatccaatcaaatatcactttgcatttaagttatcaagtccctttactctcctagaactgtcaactccttttcttttcctccttcttc

SEQ ID NO: 416 - DNA, 710 bp, Protomyxzoa rheumatica
gaatggaatggaatgcagtggagtggaatggaatggaatgacgtgcaatacaatggagtggagtgcagtggaatagaatggaaaggaaaggaatggaatggacaggaatggaatggagtggaatggaatggaatggaattgaatggattggagtggaaacgagtggagtggaaacgagtggattggaatggaatggaatttaatggaatttaatggtatcttgtggaattgaatggaatggagtggaatggaatgaaatggaaagttgtgcaattgaatggaatggaatggattgtaatggaatggaggggagtggaatggaatggagtgggtttgaatggaatgaaatggagtggaattgattggagaggaatgcattgcagtggtgtggagtggaatggtatggaaagtaagggagtggaatggtgtggagtggaatggaatggattggaaagcaatgcagtggaatggagtggagtcgaactgagtggagtaaatggaatggagtggagtggaatggaatggcatagagattaatggtgtggagtggagtggaaatgaaaggaatgaaatggagtggaatggaatggaatggaatggattttaatggaatggagtggagttgaggggagtggagtgcaatggaatggaatagagtagagaggaatggaatggaatgaggtggaatggagaggagtggaatggaatgg

SEQ ID NO: 417 - DNA, 138 bp, Protomyxzoa rheumatica
cattcgagtccattccattcctgtccattccagtccagcccattccattccatttgagtgcagttcattccattctattccactccattccattacatgccattccactccagtccactccaatccactccactccat

SEQ ID NO: 418 - DNA, 164 bp, Protomyxzoa rheumatica
tggaatggaatggaatggaatggagtgcagtggagtggaagggaatagggtggaatgacatagtgcagaaagagtggaggagaatggaaaggaaggtaatggagttgagtggaagaaagtgaaatattgtggaggggaatggagtggaatggagtgaaaaggag

SEQ ID NO: 419 - DNA, 180 bp, Protomyxzoa rheumatica
tccattcgattccattccatttaatttgattccactccatttgattccattccattcgatccgttttcatttgatttcattccattcgattctgttacattccattccattccattggattccattccgttccattccattccattcctttccagtccattccaatcgattccattcaat

SEQ ID NO: 420 - DNA, 158 bp, Protomyxzoa rheumatica
catgtcattccagttgactccattccattcctttccattccattccatcccattccactggggttgattccactctattaaattccattcaattccattccattccattaaacaccattgctttccaggtgattccattccattccattccattccat

SEQ ID NO: 421 - DNA, 196 bp, Protomyxzoa rheumatica
gcagttgagttgaatggacccgaaggaatggaatggaatggaatggagaggaataaaatggaatggcctcgtctggaatggaatggaatggattcgaataaaatggaatggacttgaatggaatggagtggaatggaatcgacctgagtgggatggaatggaatcaaatgaaatggaatgcagtggaatggaatcg

SEQ ID NO: 422 - DNA, 155 bp, Protomyxzoa rheumatica
ccattccattccattccattccattccattccattccaattcattgcacacgggttcattccattccattccattccattcaattccatttcgttctattccattctatcccgtaccattacattccattccattgcattccattccattccatt

SEQ ID NO: 423 - DNA, 207 bp, Protomyxzoa rheumatica
tcgaatggaatggactggaatgaatggaatggaatagaactgactcgaatggaatggattgcaatgtaattcatttgaatggaatggaatagaatggaaagtaatataatggaatccaaaggaatgcaatggaatggaatggaatttaatataatgtaatagaatagactgcaatggaatggaatagaatggaatgcaatcgagtgg

SEQ ID NO: 424 - DNA, 500 bp, Protomyxzoa rheumatica
attccattccattccattccattccactccactccattcccttcccccacattccactccaatccactccactccactacacacgggtccattccattccaatccacccctcttcattccacttcactccactccattccattctattccgttcctttccattctgttcctttccattccacaccattccattccactccactccattccactccacacctgttcactccattccactccattacactacactcctttcctgcccattgcattccattccattccactgcactctgatgcactccagtcaactccactacactgcactctgttccactccactccaatccattgcactccattccataacactgcactccattccattccattcgactccatttcattccactcctttatttcgactggctctctctctgtcacccagacttcagtgcagttgcacgatcttagctcaaatatcatttcaccattccctt

SEQ ID NO: 425 - DNA, 149 bp, Protomyxzoa rheumatica
ccccccccctaagagggtcgaccgacaggcccgcagggcccggaaaatcaagctacgagatggtttaagacgtttcaccgacaacctccgcgcccgtagatgcggcaacaccgcatgtgatgtatccggcgtcggaatccgtgttgtcg

SEQ ID NO: 426 - DNA, 128 bp, Protomyxzoa rheumatica
gtggattgaagtggcgtggagtgtaatggaatagggtggaatggaattgaacgcagatgagtgtattggagtggaatgcagtggaaaggaaagtaatgggacggaatggaattgaacgtaggggagtg

SEQ ID NO: 427 - DNA, 135 bp, Protomyxzoa rheumatica
cattcccttttattccattccattccattccacacgattcgattcctttccattccatttgattgcattccattcgtgttgaatccattccattccaaaccattctattaaattctgttcctttcctttccattc

SEQ ID NO: 428 - DNA, 285 bp, Protomyxzoa rheumatica
ccactccattccattcaactccactcaactccattccttccattccaatccattccattacattccattccactccacttcactccattctattccattccattccattcggttccatttcactccattccatttaactccattccattccattccattccatgcgagtcctctccactccaatcttctctactccactccactccattacatcccaccccttttcactccactccactccaccccattcaattccaattgataccattccactccactccactc

SEQ ID NO: 429 - DNA, 325 bp, Protomyxzoa rheumatica
gaaatgattggaatggaatgctatggagtggagtggagtagagggtagtggagtagagtggagtggagtttagtggaatggaatggaccgtaatggaatagaatggaatggagtcgaatggaaaggagtggaatggaatagcatggaatggagcggaatgaaatggagtggaatggagtggagtggatttcaatgaaatggattggaatggggtggagtggagtggaatagaatttaatggattgtagttttatggaatggaatggaatggataggatttgaatggagttcaaaggagtggagcagaatggaatggagtgaaatg

SEQ ID NO: 430 - DNA, 181 bp, Protomyxzoa rheumatica
gtgtgggtgtgtgtgtgtgtctgtggtgtgtgtgaggagggatgtgtgtatgatgtggtatgtagagatgtgtgtgtttggtcagcatctaagtgtgtggtgtgtgtatttgtgcatatggtatgtgtatgcatgtgtgcagtgaacatgtaggttcatgtgtgtgcatgtgtaggtatac

SEQ ID NO: 431 - DNA, 141 bp, Protomyxzoa rheumatica
aatgaaatgaatggacccaaatgaaatggaatggaatggaattgactcgagtgtattggaatggaatgcactcgaatgaaatgaaatgcagtggaatgtattggaatgaaaagcaatggaatggaacagactcgaatggaa

SEQ ID NO: 432 - DNA, 134 bp, Protomyxzoa rheumatica
attccattccattccactgcactccattccattccattccatttcattcgtgtccatttcattcgtgtcttttccattccattccacctgagtccattcctttccattcaattccattcgaatcccttcctttc

SEQ ID NO: 433 - DNA, 133 bp, Protomyxzoa rheumatica
atcaccatcaccattatcaccatcctcatcaccaccatcacaatcactataccatcactagcatcatcatcatcaccatcctcatcaccatcatcacatcactatcatcaccatcatcattatcaccatcagt

SEQ ID NO: 434 - DNA, 128 bp, Protomyxzoa rheumatica
atggaatggaatcgaattgaatgtgatcgaaaggaatagaaacgaatggaatggaattgaattgaacggaattgaatgtcatcaattggaaacaaatggaatacggtgaagtggagaggagtggagtg

SEQ ID NO: 435 - DNA, 172 bp, Protomyxzoa rheumatica
tgcattccattccactccactccattctactccactccacgacattccactccactccactcattccattccgttccactccattccattccattccactctagtccataccactctaatccagtaaattccactccactccattccattccattccactccaccctgttcc

SEQ ID NO: 436 - DNA, 166 bp, Protomyxzoa rheumatica
attccattccatttcattccattccattccattccactccgctcaattccattccattgcagtccattccattccactaaattccactccactccacataattccattgcactcccctccattccgttccattccatcccattccattccattccactccattcca

SEQ ID NO: 437 - DNA, 135 bp, Protomyxzoa rheumatica
aactcattggtgtgtagttgtattttcttgtactttctgtctggcttatcagtgttacatttgcttgataaaaggagatagtgtgctagaatcttcttcatagagcattggcattacctggcctttgaaggtttg

SEQ ID NO: 438 - DNA, 132 bp, Protomyxzoa rheumatica
gaaatgaatggaatgcaatcaaatgaaatggactggaatggaatgcaataaaagggattggaatcgaatggaaaggaatccaatggaatggattcgaatggtatcaaacggaatcaaatggaatgcgatgaa

SEQ ID NO: 439 - DNA, 187 bp, Protomyxzoa rheumatica
gaatgggatggaatggaatggaatggaatggaatctacaagaaaggaatggaattgaatggaatgaaatgcaatggaatctcccagaatggaatggaatggaatggaatggaatcgaatggagtttattggaatgaaatggaatggaatggaatgcaatcaactcgcgtggaatggaatggaatgga

SEQ ID NO: 440 - DNA, 132 bp, Protomyxzoa rheumatica
ctccttctcattttcctcctcctccttttatcctcttccttcttctctcctcttccttttacttctcctctcctcctcctccttctcctcttctcctccttttattcctctcctcctcctcttttcctcctc

SEQ ID NO: 441 - DNA, 448 bp, Protomyxzoa rheumatica
tggagtcgaatggaatgggatggagtggaatggaatggactgtaagaaaatggatccgaacggaatggaaggaatggaatggattcgaatggaatggtgtagaatggaatggaatagagtagagaagagtggagcggaatgaagtggaatggagtggaatgggaaggaatggaattctacggagaggagtggattggagtgggatggagtgttacgcaatggaatgcaatggaatggagtggagtggagtggagtcgggtggagtggagtggattggaatgcaacagagttgagagaattggagtggagaggaatggagtggcctggaatcgaatggagtggactggatcgcagtggcacagaatggaatggatgggagtggagtggagtttagtggaatggaatggatgggagtggagtggagtgaagtggaatggaatggaatgga

SEQ ID NO: 442 - DNA, 194 bp, Protomyxzoa rheumatica
atgaagtcgaatggaatgtaatggaatggattaggaatggaatggattagattggaatggaatggagttgagtggaattgattgcagtggaatggagtggagtggaatggaatgtggtcgatttcagtagagtggagtggagtggactggagttcaatgaagtcgagtggcgtggagtggaatggaatggagtg

SEQ ID NO: 443 - DNA, 172 bp, Protomyxzoa rheumatica
accattcgactcatctccattccattccaccccactccacttcattccattccactccactccactagattcaacttctctccacacaattccacttcattccacttgattccactccagtacattgcattgcactccattccattccactccactccattccattccactc

SEQ ID NO: 444 - DNA, 178 bp, Protomyxzoa rheumatica
gaatggaatggaatgcagtggaatcgaatggaatggaatgaactcgaatgaaatgtattgggcgaaaatgtaatgtaatggaatggaatgaaataaaattgaatagaatggaatggagaggactggaatggaatcaaaaggaatgtaatagatttgaatggaatagaaaggaatggaa

SEQ ID NO: 445 - DNA, 199 bp, Protomyxzoa rheumatica
ccattcgagtccattccattccattccattagaatccattacattcagttacattctagtacattccattccattccgttctattctgttcgtgtccattaaattccattacattccagactagtgcattccattccagtcgattccattacattccattcctttgcggttcattccattccattctattccaattgat

SEQ ID NO: 446 - DNA, 131 bp, Protomyxzoa rheumatica
aaaaaaaaaaaaaaagattgtgccactgcactctagtctggtagaaagtgtgcgatcccttcgaaataaaggaatggaatggaaaggagtggaatgggatggaatggagtggaatgcagtggagtggagtg

SEQ ID NO: 447 - DNA, 226 bp, Protomyxzoa rheumatica
aatggaatggaatggaatggaatggaatggagtggaatgggatggaatcaaccagagtggaagggaatggaatggaatggaatagaaaggaatggaatagaatggagtggaatgggagggaatcaccactagtggaatggaatggaatcaaaacgaatgaaatggaaaggaatgggacgaaatcaacccgagtggaatggaatggaatggaatggagtggaatgga

SEQ ID NO: 448 - DNA, 129 bp, Protomyxzoa rheumatica
ctaaactccactcctatccattcaattgcattccaccccattccatttcactccattccaaactactccactccacatcactgcattccattcgattccattagatgccattcgattcccatcctttca

SEQ ID NO: 449 - DNA, 157 bp, Protomyxzoa rheumatica
agccttctgtttttgcgatagcttcaattacgctaggcatcaaaaagatgttttcgatttccgaaaccgggaggattgcgatacccttacttcgtaacagcagaatgtcagattcatcgtaagcgtcggcatccacaattcctgcgcaggtgacgcg

SEQ ID NO: 450 - DNA, 599 bp, Protomyxzoa rheumatica
ggaagggccatgcggctactgcccttctaaacgactacgatctgcttctgcagtgcctctttgccgaacaaacaaatacttccttacagactcacaaagacgcacgattaggctcgcctacaattccaaagcttactaatttcgagagactcagcgaaatctggaacagactccttcctcatagaacacttgaagttacgggcgacgatataaaagtcgctgcagcaggatctgacgaaccatatcaggccgaagaattgagtgacggcgaacgagcgatcttttacctcatcgggcaaacacttacggcgtcaaagaacagtctgattatcttcgacgagcccgaactccacatccaccgggcgatcatgtcgcgactttgggacgaactggaggcaactcgacctgactgcgcgacgcttttgattacgcatgatctggaattcgccgcatcccgcgagggacagaaatttgtcgttcgagattactctcccaagaacggttggagcatcgaacaagttcctgacgacacaggctttactgaggaaatatcaacactgatccttggcagccgaagaccaatccttttcgtagaagga

SEQ ID NO: 451 - DNA, 155 bp, Protomyxzoa rheumatica
atcatctatcaatcaatttatctatctactatctatctatgtatctatatatctaacatctatcatctttctatcaatcatctatcatctatatatcaatcatctatcatttatctatatattcatctatcatctacctatcatcaatcatctat

SEQ ID NO: 452 - DNA, 166 bp, Protomyxzoa rheumatica
cctgggacagttaggaaaggcttctcagatgagacctggacacacggagcaattaagtgacctgccaaggtcgcacactggtacactgtggagccaggacttaaaacaccaggtccatctggctgcagagactcgggctggttactggtctgctactgctctcctg

SEQ ID NO: 453 - DNA, 169 bp, Protomyxzoa rheumatica
tctgccccgttgactgttgcctcagatacctcaggtgtgtgtcagacaccagtccaccatgtccaccagactccaggggttgtacattaacgactctcctcaataccatcttttagctagagatgagtccttaactgttcctcctcttgggagaggcaagggtagttgt

SEQ ID NO: 454 - DNA, 151 bp, Protomyxzoa rheumatica
ttgcattccacttcactctactccactactctacactccatcccattccatcccattcaattccactccactccactctattgcattccctctcatcccattccaagccattccactcaaatccacactactccactccactctactccac

SEQ ID NO: 455 - DNA, 163 bp, Protomyxzoa rheumatica
aatggagtcgagtttaatgcaatgtagtggagaggaacagaatggagtgttctgtagcggaaggaagtggaacggagtggagtgaagagaagtgaaatggaatggattggaggggaacatacagagtggaatggaatgaaatgccctgaagtggagtggaatg

SEQ ID NO: 456 - DNA, 493 bp, Protomyxzoa rheumatica
ctccattccactccactgcactccattccactacattccatcacattccactggaatccactcctaatcataccaccccactccactccgctccatttcagtccagtccattccactccactcctctccataacactccattatactccattccattccattccactccattccaaggcactccattccactccattccattccactccatacgaatcccctcccctccactccaatttttccacacccctgcaaaccattccaatccatttcatgcccttccatgccctgcaattccactccactccattacactccactcaattccactccaatctaccccactcatctccactccactcaactccactccactcgtttccattctactcctctccactccattccagtccacttcattcttctccattccattccataccattcctctccattccattccactccactccacttcgtttctctccattcc

SEQ ID NO: 457 - DNA, 150 bp, Protomyxzoa rheumatica
cgagtccattccattacattccatttgagcccattccattccattccattatattccaatccatgtcattccattctgttaaactctattccattcctttccattccattcgtgtccattccattacattagagtccattccattccatt

SEQ ID NO: 458 - DNA, 464 bp, Protomyxzoa rheumatica
ggaatggattagaatggaatggaatggaatggaatggaatggaatccacccaagtggaatggaatggattggaatggattggaatggaatggaatggaatggaatggtatggacttctaacgagtgcaacggaatggaatggaatggaaccaacccgagtggaatggaatggaatcgaaattaatggaatggaatggaatggaatcaacccgagggaatggaatggaatgcaatgaaatggtatggaatggtgtggaatggaatggaatggaatgcaatggaatggaatcaaagcgagtggaatggaatggaatgaaatggaatggaatggaatcaacacgagtggaatggaagggaatgtaatgggatgggatggaatggaatggaatgcaatgcaatggaatcaacccgagaagaatggaaaggaaaggaatggaatagaatggaatggaatggaatggaat

SEQ ID NO: 459 - DNA, 217 bp, Protomyxzoa rheumatica
ttacgactattttacgacaacgtgaaacatacccagggttcagtgtatttaattgtaaagtagtcgtaatttcgtcgtaaacaattaccgactatggaacgagtacaagtttcacacgctctgtacaatactattaatcgttaaatggtcgccagataatacgattattaaacgacgaatttatactgtatgggcttatgtcgtaacatagtcgtaa

SEQ ID NO: 460 - DNA, 249 bp, Protomyxzoa rheumatica
aacgttaattactaaaccattaaaccatcactaagaataacaaaggatatttttagaaaacatgatcttaagtctacggaatcactggcaaatcagaaattacccacctgagcacagagcaaataattcatgccccagtgaataaattccttgtagcatagatgccagcaaagctattctttctaataaactattttttttcaatattaccttctgtagaaggaacagggatttttttttaaactaaat

SEQ ID NO: 461 - DNA, 174 bp, Protomyxzoa rheumatica
ggaatggagtggattttaatggaatgaaatggaatggaatggaatggaatggggtggagtggagccgagtggaaaggaatggagtatagtcttgccgagttgagtgaagtgaagtggagtggagtggaatggaatggaatgaagtggagtgcactggagtggagtggaatgaaa

SEQ ID NO: 462 - DNA, 127 bp, Protomyxzoa rheumatica
ttagaatacatagttgtcaatctagaaatccatactaaaataaatacattgacatgtgaaagctaaatgaatattttcagacgttaaaaaataacaaaacagaaatgttatatttcatggaccctca

SEQ ID NO: 463 - DNA, 152 bp, Protomyxzoa rheumatica
tatatttaattagtaaatttaatggttacatttaaatgttttaatataaacatataaacacaataaatttactaattaaatataaaggttttttatatgcatacttaaaatgtacaacagggttatcttaatttatttttcccattttcaat

SEQ ID NO: 464 - DNA, 327 bp, Protomyxzoa rheumatica
ttgtttccattccattcgagtcctttccattttattccattccattcgatatcattccattacaccaaattccattctattcattttgatttcattcaattccatttcatttgattccattccattcggttccaatccattcgacttcatttgattcaagtccattccattccaatccatccctttacattccactggattccaatccgtttgattccattttgttccagtccattccattgcagtccattccactccattcctttccattcgatggcattccattcgattccattccacttaattccactccattccattccattg

SEQ ID NO: 465 - DNA, 160 bp, Protomyxzoa rheumatica
actccattgcattccattccgttcaattctacttcactcccatcctctccactcaactccactccactccactccattcaatgccaccccactcgtttccattccatttaattccattccattccattccactgcactccgattaagtccactcaactcc

SEQ ID NO: 466 - DNA, 135 bp, Protomyxzoa rheumatica
cctgctgaatcaaaagacaggtttaacgttatgagatgaatccagaaaccacaaagcagtttcactcttagtttctttcttgtatttatctagggatatttcattttgcctcataggtctcaatgggttcccaaa

SEQ ID NO: 467 - DNA, 293 bp, Protomyxzoa rheumatica
ggagttgagtggagtggaaaggagtgaatggagtgtaatggagtggagtggagaggagtggagttgaatgtaatggagtgcaatggaacagaacagaacggaatggaacggaatgggatggagtggagtggagtggagtttagtggagtggatcagagtgaagtggaatggaatgggatggaatggaatggaatcgaaaggaggggaatggagtggatggagtttagtggtgtagagtggaatggagtgaagtggagtggagtggactggagtggactggagtggaatggagt

SEQ ID NO: 468 - DNA, 177 bp, Protomyxzoa rheumatica
aagattgaaatccagatacgatcccaattacaacatgcgtgggcaaccgcagtggaaactgtgggcacgctgcagcaacaagcccttaagtcaagccagggcgagcgggactggctacgattttttgcccttgcgagcagcgcgtttgcattccgagaaggaacctccccagttcct

SEQ ID NO: 469 - DNA, 180 bp, Protomyxzoa rheumatica
tcagtcgaacaaacactgcagtgtctagaaagtagttcgggtacgccttacggacggcatctagtgaatccactgatacgagcactgcttccgccccggtaatgctcctgagttttcgctcgacctccaaatatttctggtttgcaagcgtagactcgctgaatttaaacgttgttacct

SEQ ID NO: 470 - DNA, 151 bp, Protomyxzoa rheumatica
tttgtaggcaaggctaaccagactgttagagatcaatttacagagtgttacatcatccattatatggctgacataatatgtgtagtaaaaaatatagatcaacttattcaatattattcactttacaaaagacaattacaaatgctggatt

SEQ ID NO: 471 - DNA, 154 bp, Protomyxzoa rheumatica
tccactccattgcattccattccactacactccattccaatccaatccactccattgcacttcactcccttccattccattccattcctttcctttccactcatctccattcctctccagtccactccattcaactctacaccattccactgta

SEQ ID NO: 472 - DNA, 191 bp, Protomyxzoa rheumatica
tcaaatagaatggaatggaatggaatggaaacgaatggaattgactagaatggaatggacttgaatggaatagattgaaacaaaatggaatcgaacagattggtatcgaatggaatggaatgatatggaatggaatgtaatcgaatgttgtggagttgaatggaatgtaaccacaagaagtggaattgaat

SEQ ID NO: 473 - DNA, 197 bp, Protomyxzoa rheumatica
gttccattccatttcattccattcgagtccactccattcgtgtctattccattccagtccattgcattccagtacattcttttccactccactccattccactccactccattccatgccactccacacaactccactgcattccactcctttcccttgcactccactccactccattccactccactccactacat

SEQ ID NO: 474 - DNA, 143 bp, Protomyxzoa rheumatica
ctgtactgtttcttctgtgtcttacaagaaacagagcataagaagagaagaacccagaaatgtgcagaggaggaaagagagagagaagggaaggagaagactttgatcagagcaaaagaaggaatgaagctaaaaatactata

SEQ ID NO: 475 - DNA, 176 bp, Protomyxzoa rheumatica
cattattttcgagtcaattccattcaacatcatatctttccattccattccatgtgggtcctttccattccattccatttgaatccatttgtttccattcgattgcattccattcctttccatttcattctattaaattccactccattccatttcattccattcaattccactcc

SEQ ID NO: 476 - DNA, 157 bp, Protomyxzoa rheumatica
caccacacccactgcacacaccacaccatgtgcacacacacacacaacccagacaccatgcacactgcacatacaccatgagcacatgcacacacatcacacagacaccacacactgcacacacaccatgtgcacacaccacacacacactgcacac

SEQ ID NO: 477 - DNA, 167 bp, Protomyxzoa rheumatica
tggattccactgcattcgattcctttccgtacgattccattccattctagtccattcttttcaagttcattccattccagtccattacatgtgagtccattccattcaattctcttccattccattccattcaattgaattcgagtccattccattccattccattc

SEQ ID NO: 478 - DNA, 148 bp, Protomyxzoa rheumatica
gaatggaatggagtggagtggaatggattggatttgagtggaatggaatcgaatgtaatggagttgaatgaaacggaatggaatggagatgtatggagtggagtggaatggaatggaatgcaacggagtggaatggaatggaatggaa

SEQ ID NO: 479 - DNA, 290 bp, Protomyxzoa rheumatica
aatgaactggaatgtaatggattcgaatggaatggactcaaatggaatggaattgaatggagtgaaatggattggaatggaatcgaatcaaagtaaatgaaaaggaaacgaatggaatcgcatatattggtatataatgtaacgtaaataaatggaatggaatcgaattgaactgaatgaaatggaatataatgtaatagaatggaatgagatggaatggaatagacttgaatgaaatggactcaaagggaatcaaatagaacgtaatagaatggaatggaatggaatgg

SEQ ID NO: 480 - DNA, 242 bp, Protomyxzoa rheumatica
catgccactccatttcattccactacacaccattccattccatagcactctattccatttaactccattccgttccactcgactccactactttcctttccactcgattccattccactccataatattccactaaactccgttccattcttttccattccacttgattccactccattccactccgttcccctccacttcaatcacttctttaacactccattctattgcatttcattcca

SEQ ID NO: 481 - DNA, 295 bp, Protomyxzoa rheumatica
tccattccattccattccattccattccattccactccacccaagtccactctattccattccactccactccagtcctcttcaatccactccactccatttccctcaattccattgcattccactccaatccattctttccactccagtatattgcattccactccactccactcaactccaatcaaatccactccactcctcttaattccattcctttccattccactgtactccactccctgcatctccaatccattgaaatatactccaaaccattccactccactccatt

SEQ ID NO: 482 - DNA, 242 bp, Protomyxzoa rheumatica
ccctcagatttctccttttggatcccttccttgctgacctgctcccttgagggccagcccaccttctccagtgggcagcccacccctgggggctcgcaccccttcttcatgggtggagacgctggagtttctgtttttctcctccccgcctggtttcccacctccgcagtttagtttattcctagagaatgttgtcctgagccagggaggagaaggaggcattgtctttctccagctggtga

SEQ ID NO: 483 - DNA, 126 bp, Protomyxzoa rheumatica
attacactccactccaatccaatccactccactctagttgattcatctccagtcgatcccattcccttcctttgcattgcactacaataaactacactccactccattgcattccactccattccg

SEQ ID NO: 484 - DNA, 137 bp, Protomyxzoa rheumatica
atggaatggaatgaaaaggaatggaatggaatttaattaaatggagaggattggaatgtagtagataggactggagtagagtggagaagaatcaaaggaatggagtgcagtcaaatggagtgtagtggagtgtagtg

SEQ ID NO: 485 - DNA, 369 bp, Protomyxzoa rheumatica
tttcattcaattcctttccattagattccattccattcgagtccattcctttcgagtccattccatttgaatccattccattcgagtccatagcattgcattccattacattagagtccattaccttccattccattctattctgttcctttgcattccattgcatttgattccattccattcgggtccattccattcgagccctttcctttccattccattccattctagtccattccacaccattccattccactctattcggtcccattctaattgattccattaaattcgattcgattccattccattccattctattccagtcctttctattgcatttcattccattccattccattccgttcg

SEQ ID NO: 486 - DNA, 188 bp, Protomyxzoa rheumatica
tccagtgactagtctctcatatctactgtttctcttctcttttgaataatgtgatttcacaattcaaccttgcccggacaaacaggaaaacccattccaaattccaacctggctttagaaacattttcttggagggtggtgggaagtgggatgggggtttgggaagggatgctctcccagctccttcc

SEQ ID NO: 487 - DNA, 350 bp, Protomyxzoa rheumatica
gggattcgaatggaatggaatgcagtggagtggaatgcaatggaatggaatggaacggaatgttatagaatggaaaggagtggagaggaatggaatggaacggaatggaatggaggggaagggactggagtggagtagagtatagttgaatggaatggaatggaatggaatggaatactgtagaatggtatgtagtggagtggaatggaatggaatataatgcagtggaatggagtggagtgaagtggaatggaatggaatgcagtggaatggagtggaatacagtggagtggaatggaatggagcggactgtaaagaaatggagtggaatggaatggcgtggaatggaa

SEQ ID NO: 488 - DNA, 159 bp, Protomyxzoa rheumatica
caagaaaccatgggcttcattcattcaaaaagcacaattgcatggtagactattaccttgcctgctcatttatttgtatatccctagcttctcacactgaagatatgcacactaaacactggtcaaacaaaaatgagtggataaatgattaaccaattt

SEQ ID NO: 489 - DNA, 250 bp, Protomyxzoa rheumatica
cattccattccattaaattccactccactccactccacaccactacattccattacatacgattccattgcactccattccactcctctccactccagtgcactccattcccctccattcttttccactcctctcccctccactctcctccactccattccattccattccactccagtgcactccactacattccagtaatttccacatcactccattccactcaatcccattccactccactccattc

SEQ ID NO: 490 - DNA, 164 bp, Protomyxzoa rheumatica
cattccattccattccatgccattgcactcaactccattctactccattccattccactccagacaactccattccaccacattcctttccaacctattccattccactccactccttttcactccattattctctaatccattccattccattctattcctct

SEQ ID NO: 491 - DNA, 124 bp, Protomyxzoa rheumatica
cactccgttgcattccattccattccactccagtccattcgactgcactgcattccattccactccacgacactccactccattgcactaaagtccactccaatccactctactgaaatcaact

SEQ ID NO: 492 - DNA, 157 bp, Protomyxzoa rheumatica
gtggagtggagtggagtggagtggagtggagtggagtggattggagtgaaatggaatggaatggaatgggatggagtgaaattgaatggagtggaggggactggagtgaaatagaatgggatggaatggaatgcaagtgaatggtggaaagaaattt

SEQ ID NO: 493 - DNA, 142 bp, Protomyxzoa rheumatica
tggactggagtggaatttaatggaatggtatggagtggaatggaacagagtggagtgtagtagatggaatggaattgtatggaggggagtggagaggagtggagtggaatgcaatggaatggaatggaattttatggagggg

SEQ ID NO: 494 - DNA, 162 bp, Protomyxzoa rheumatica
attccattccattcgactgcattcctttcaagtccattaaattccattccattactttccattgcattagattccaatcgattccattccatttttttccagtccattcctttcgattccattccattccagtccattccatttgattccgtcccattctat

SEQ ID NO: 495 - DNA, 271 bp, Protomyxzoa rheumatica
caccccaattcaatattttcaattcctttccaccccattgcattccactccattgcactccacttcaatgcattgtgttccattgcatgcgatgccttttgattccattcaattcaattcaatgccattccattccattccattccattctaatccattccattcaattcctttccattcgattccattccatttgactccactccattctattcctttccattccattatattccattcaattcctttccatttgattccatttgattcc

SEQ ID NO: 496 - DNA, 161 bp, Protomyxzoa rheumatica
ggagtggaaaggagtggaatggaggcgagtggggtgggatggagtggaaaggaatggaatgcaatggaatggactcaaattgaatggaatcgaacataatggaatggagtggaatgggatggaatggaatggaaacaaatggaatggaatggaatggaatg

SEQ ID NO: 497 - DNA, 122 bp, Protomyxzoa rheumatica
gtgaaagtgatgcctaagccacacaacatcattcagtcttcacaacgaccctgctggttctgccacagaaatccttctgtgatctgtttccttgtccccaccctccagtcattacctttcac

SEQ ID NO: 498 - DNA, 138 bp, Protomyxzoa rheumatica
tttgacacagcagttttgaaatattctttttggagtatttgcaagtgcatatttggattgcttggaagccgacgggagaaaaccaaatatcttcatataggaactacacagactcattctcagaaaccactttctgat

SEQ ID NO: 499 - DNA, 171 bp, Protomyxzoa rheumatica
ataatatatatatatgtgtatatatgtgtatatatacacatgtatatatgtatatatgtatacataagtatatatgtatatgtgtatatatgcatatgtgtgtttatatgtatgtatatatgtatgtgtgtatatatgtatttgtgtgtgtgtgtgtgtgtgtgtgtgtgt

SEQ ID NO: 500 - DNA, 322 bp, Protomyxzoa rheumatica
cgtcgcaggatcgatcgcaccctcaaaaaggtggacttgagcgatgccgatagcgtcacatcgctatcgtccttctactcggcaaagacatcagcactcgatatctcagcactcgcgcaactagcagagactagcattcataaggcaatcactgaaagaaatgcgcccgacttactgagatggtatgacaataagggtattctcggaatcgcatgcaaggtgaaaggcacgactaaaccacaatttgaacagtggattgcaagagttctacgaaatgacactgcaccagcattagctgcagcaattcgcaacctattgccag

SEQ ID NO: 501 - DNA, 316 bp, Protomyxzoa rheumatica
cattccacacactccattccattccattccactctattcccttccaacccactccattccactccacttaactccattccagtccactcctttccttttcactccataccattccagtccactccactccaatccattaaattccattccattctgctccactccattacaatccattccactccattccattccatttcactcaagtcatttacattccattccgttccactccaatcctttccattccattctattccactccaatccattctattccattccactccattccattgcattccattctattcca

SEQ ID NO: 502 - DNA, 136 bp, Protomyxzoa rheumatica
gattattaatattgttagctttagttctatcattttactatttgtttcatgttatctcgtttgtttattgttgccttttcctattttttgccttgttttaaataaattgtgtacttttcattttatttaatttttt

SEQ ID NO: 503 - DNA, 145 bp, Protomyxzoa rheumatica
tggtataaatggcatgtggggtgtgtgtgtgtgagggtgtgtgatgtgtatgtgtctctgtgtgtggaggcatatggtgcatgtgtggtgtgtgtgatgtgtgtgtgatatggtgtgtgtggggtttgtttgacgtgtgtgaggt

SEQ ID NO: 504 - DNA, 130 bp, Protomyxzoa rheumatica
ttactctgaggtatatgattaggggtcgattagctatacatgtagcttcatcttcactagaaaatgtcaagtggttttctaaagtggttgtaacaatttatactctcactagcaattcataaaacttcca

SEQ ID NO: 505 - DNA, 163 bp, Protomyxzoa rheumatica
tatatgcataaaaatatgaccacatattatcaaagttacagatgtatagataatctcttctctgcagggctctgtgagctatgaatattcacttgtcaatatttatagaattatggaatatttattgaaaatactatgccaaaaacagcatataaactaacaa

SEQ ID NO: 506 - DNA, 291 bp, Protomyxzoa rheumatica
aatggagaggaatggagttgagtggagtggaatggagtggagtggactgaagtggaatggagtggactggaatagaatggagttcaatgacttggaacggagtggagtggaatcgaatggaaagaagtggaatggcatggagtggactggattggagtggaatgaagtggagtggaatagaatggactggaatttactgaaatggagcggaatggactggagtggaatggaatggaatggagtggaatgggatgcaacagagtggagtggagtggaatggagtagagtgga

SEQ ID NO: 507 - DNA, 165 bp, Protomyxzoa rheumatica
cactccactgaattccaatccacttcactgcattgcattcaattcaatgccaccccactgctttccattcaatttatttccattcccttcctttccactgcactccgattagctccgctaaactccactccactcctccccattccattccgttcgattccattc

SEQ ID NO: 508 - DNA, 129 bp, Protomyxzoa rheumatica
attgaattccattccattcctttccattccattcaattccttttgattccattcatttcgattccattccaatcgattccattacatacgatttgattccattccattttgttccacttcattcaattc

SEQ ID NO: 509 - DNA, 144 bp, Protomyxzoa rheumatica
taatcagcattcatcctaggcaacagaatgtccctctccccaaagcatatggaagggtgagtgtgtgaacaaatttagggctctactaggaataaggaggaatgaggacaatgactgttgggtaatgaagatgggtatctgcca

SEQ ID NO: 510 - DNA, 197 bp, Protomyxzoa rheumatica
ttgcattccattccattcctttccattccattccactccaatccattccattacattccactgcattccattctattcctttatttctattggatctcactctgtcaccaagactgcagtgcagtggcaaaatcttagctcacattacatttcacccttgcattccattccattcctttccattccattccactcca

SEQ ID NO: 511 - DNA, 145 bp, Protomyxzoa rheumatica
gtgacatatcattgcattcatcacccaaggtgatgtaactcttgtcctggctcggcctatagggggcctcgtgacatatctctgcactgatcatttaggtgatgtaacctttgcttacgctttgcctgcagggtcattgtgaaat

SEQ ID NO: 512 - DNA, 252 bp, Protomyxzoa rheumatica
aaatggaatggaggggagtggaatggaatggagtggaatagaacggagtgtaatggagaggagaggaatggaatggagtggaaaggagtggaatggaatgaaatggacagtaatagaatgaaatggaaagctatgtgatgaaatggaatagagtgtatttgaatggaagggaatgaattggaatggagtggcggagagtggagtagtgtagaggggagtcgaaaggaatggaatggaatggaatggaatgga

SEQ ID NO: 513 - DNA, 184 bp, Protomyxzoa rheumatica
ttccattccattccatcccattccattccattcctttccacttcattccattccatccattcaattccattcaattccattccattaaattgcattcgattacattccattccattcaaatccattccgttcgattccattccttcccattcaatttgattccaatccattcgcgtccattccg

SEQ ID NO: 514 - DNA, 127 bp, Protomyxzoa rheumatica
tggaatgaaatggaatagaatggaatggaataaaataggatggagcgaagtggaatgcaactgagtcgaatggaatagaatccattggaatgacatcgaatggaatggaatggaatggacttgaatg

SEQ ID NO: 515 - DNA, 149 bp, Protomyxzoa rheumatica
atggaatggaatgaaatcaacccgagcggtacagaatgttatgtaatgggatggaattgattggaatggagtggattggaatctatctgagtggaatggaaaggaatgcaatggaatggaatggaataaacccgattagaatgcaatgg

SEQ ID NO: 516 - DNA, 196 bp, Protomyxzoa rheumatica
tccattccattccattgcattccattccaatccattccataccattccattccactcgagttgagtccattccattccattccattgcattccattccttccattccattccattccattcgggttgattctattcagttctttacactgcattcgattccattccattccacacaattccattccattccattcc

SEQ ID NO: 517 - DNA, 190 bp, Protomyxzoa rheumatica
ctgatgtctcggatggggcgcaggtggcagagttattaaatccgaggatgacagggagctggaaggattggtgagagtgcttcgtagacaagcttaggatctaaatatatctcgacagtcagaatggtagggtgaagctagcaaaatacaatttagtagaacccaaaatactggggtccaaatagccaag

SEQ ID NO: 518 - DNA, 159 bp, Protomyxzoa rheumatica
agtgaaatggcatggagtggaattgaggggagtttaatggaatggaatggagtggagttgaaaggagtggagtgtagtggaatcgattgcactggaatggaatggaatcgaattcagttgaatggaatggaatgaaatggaatggaatggaatggaata

SEQ ID NO: 519 - DNA, 125 bp, Protomyxzoa rheumatica
agtggattcaaaaacacaattctgtaattttgatgggaatttgttttttatagtaaaacataattttttattttagcggaaaacacagctttacagttttaaaaaaaaattaaataaaaaaattg

SEQ ID NO: 520 - DNA, 184 bp, Protomyxzoa rheumatica
atggattgcaaagcaaatgattcaaatggaattgaatcgaatggaatgtaaccaaatggaatggaacggtttgcaatttaatggaatggaatgcaatggaatggaacagagtgcaatcgagtggaatggaatcaaatggaatggaattgaatcgaatggactggaatagaatggacacgaatgg

SEQ ID NO: 521 - DNA, 644 bp, Protomyxzoa rheumatica
actcgactcgattccactccattccattccacaccattccactccactgctttctgttcccctccattccattctactccactcctttccaatccactccactgcatttcattctattctactgcactccacaccattccgttccattccatttctttccattccattacactattctccatttcattcatttccattcctatccattccattactctctagtgcattcctttcaactctactctactccattccactttcttccattccagtacattcctttctattccattaaacaccactacactccactccactcaattgcactcctctccactcccttccattccactccaatccattccattcaattccactacttaccactccattccactccattccattccagtccactctactccactgcactacactcgattccattccattctttgccattgtattccattccattccattccattcaattctctccattccactccaaccttctgtgcaccactgttctccactcaattcctctccactctattccactccgctccattacattacattccttttcactccattccattcctgtccactctattccaatcgattcctctccattccactcc

SEQ ID NO: 522 - DNA, 177 bp, Protomyxzoa rheumatica
aaaatactacaagcggcgagggcctcatagtgatccgatgcagcactatgaaatagaagacgtaagaaacagaccaaaggttgaacgcgttccgtttcgcgccgaaatcatcgctgagggcttcatcgcggttctccatctttccaacatcgacgaatcgaaccagattgaggacct

SEQ ID NO: 523 - DNA, 187 bp, Protomyxzoa rheumatica
gtggagtggaataaaatggagtggagtggaataaaacagagtggagtggagaatagtagagcggagtggaatgtagtgcactggagtggaatggaatggagtggagtggaatggagtggcgtggattggaaaggacaggaatggagtggagtggtggggagtagagtggagtggagtggaatggagt

SEQ ID NO: 524 - DNA, 217 bp, Protomyxzoa rheumatica
acatacatctatgtatacacacatgtatgcatatgtgtaaacacgcatgcatgtatacatacatgtatgcatacacacatgcatgcatacgtgcacacatatgtacaatgtatggatgcgtgtatgcatgtatgtatgcattatccatgtacacatatatgtatgcatacatgtatgcatgtctgcatgtcttcatgtatgtgtgcacgcatgtatg

SEQ ID NO: 525 - DNA, 131 bp, Protomyxzoa rheumatica
tgtagagcggattagcgcagcgcaatccgcttcctgattgatcttgtgccaggatcgtcgtgactttcattgtctccttagttaggcaaaagcttcgctcgctgttccgccagccattttttcgtcagatc

SEQ ID NO: 526 - DNA, 284 bp, Protomyxzoa rheumatica
ctgtctatgagcgctaccatgggggcgagtatgtactgaattttttgccgttggccgccaatgatgccaagacgatcaagctcaacatcttcatccgaacacgtgatgagaagctagccatcggacatttctcgcttgcgttggactacgcggcagtaggcagcacctccgaggccaacagcgaatttgaaaaggcgctaagcttagaccaccagagcgcgtaccgagagttctacgccaatcggattgacttcatgcagaacttttcgaagctcgacgatctg

SEQ ID NO: 527 - DNA, 266 bp, Protomyxzoa rheumatica
cctgtcgaaagaaaggaatgcaatggaatggagtcaaatggaatgaaatggaatcgaatggagtgtagcgaagcggtgtggaacggagcggaatggagtggaattgagtgggatggattagaatggaatggagtgacctggagtggagtggagaggaatcgagtgaaatggaatgggatggaatagaaaggagtggagaggagtggagtttattggagtggaatcgaatggagtggaatggtatggaatggaattgaatggaatgg

SEQ ID NO: 528 - DNA, 279 bp, Protomyxzoa rheumatica
cattacactccattccattccattccactccactccaatccattccaccccacttcattgttttccattctattccactctactccattccgttcaattccattccactccactccactccaatccactccacttcagtcaattccactccaatccattccattcgattgcattccattccactgcaatccacagcactccactccatgcctttccactcccttccattccattcgattccattgcattccattcgattccactactttccattgcact

SEQ ID NO: 529 - DNA, 136 bp, Protomyxzoa rheumatica
caatatcattcactcacgatctcactcaaaatctcacagactcaaacgatctcactcacgatctcattcactcacgatctcactcacagtctctcacgatttcactcatgatctaactcacgatctcactcattca

SEQ ID NO: 530 - DNA, 142 bp, Protomyxzoa rheumatica
tggaatggaatggaatcaaatggaatggagtaaaatggagtggaaaggagtggaatggaatggactggtttggggtaggatggagtggagtggagtggaatggaatggaatggaatggacaggaatgcaatggacccaaata

SEQ ID NO: 531 - DNA, 266 bp, Protomyxzoa rheumatica
agcactgttcacaatcatcataggcggcaacatcgtttccaggggagttacattcgacaacctattgtccatgttcttcacccgcgactccaagcacaagattcagcaagacacctacatacaaagagcgcgaatgttcggatcgcgacgcagtcatctaaggttttttgaactaacaatacctgaaacactctacttggactggcaccgctgttttgttttccacaaattggcgcttgaagcaatcaaagcgaaaatgggctctc

SEQ ID NO: 532 - DNA, 616 bp, Protomyxzoa rheumatica
ctccattccacaccactccgttccactcccctacactccactccactccactccatttcattccactccactccattctattccattccattcctctccactacattccattccaatccatcaaattccattccattccactgcactgtgacccactcctctcaactccactccactccaccccattctcttctgttccactccattctcttccattcaattccataccgttccattccattccattccactccactcccttccattccactccattccactccactccacacaactcctcacaactccagtcaattccactcaattccaccaaactcctctccactcactacactccattccagtccatttcattccattcaattcaagtgcactccgatccactccaatgaactccactccactccaccccactcctttccattctcttccattctgttccattccattccaatccattcaattccactccactccatttcacaacattccactccattccattgcactccactgcattccactccattacactccactccattccctccctttccactgcattccattccattaaactccactccactccatt

SEQ ID NO: 533 - DNA, 314 bp, Protomyxzoa rheumatica
attgtctccactccactcttttccattacattcttttccactccattacacacattccattccacttcactcgattccactcctctccattacattttgttcctttcaaatccattccattccccaccattcctttccattccattccattcccctcctctccttttcattccattccattccacttaattccattacactctattccattccactccaatccattccattccattccactcccctatacaccactccacacaccgccactccattgcattccattcccttccattcaaatacactccattcca

SEQ ID NO: 534 - DNA, 140 bp, Protomyxzoa rheumatica
ctccgtcaagggcaattgagtggaatcattgaatggaatcaaatggaatcattgtcgaatggaatggaatggaatcatttaatggaattgaatggaatagccagtgaatgaaatcgaatgaaatcatcatcgagtggaat

SEQ ID NO: 535 - DNA, 138 bp, Protomyxzoa rheumatica
tatttcgataccggaaggccatgcgcactttcctgaatgaagtgacgccaaaatagctttgctaaaagaaatagccgagagatcgaccgtggcaaagaatgcattgcgagaattatcccggtaccttccgagtcctcc

SEQ ID NO: 536 - DNA, 356 bp, Protomyxzoa rheumatica
tcgattccattccattccacttcactccactccactccattccattccactcccatcaattccattcaaatcaattccactccattcctatcttttccattccggtccattccattccactccactccactctactgcactgcattccattaaattctgttccattccattccattccattccattcaattcctctcgaccacaatccactccactccactccactccaatctattccattccgttccattccattccagtccactcagttccattcctatctactccactccattccattccattccatttcattcctttccattccattccgttccattccactgcactctgtt

SEQ ID NO: 537 - DNA, 164 bp, Protomyxzoa rheumatica
cgattcgattccattccattccattccattccattccattagggtcccttccattccatgtcatttaggtccattccactacattccatttctttcgagtccatttcatttcattccattccacttgagtcgcttccattccattccattccattgcattccac

SEQ ID NO: 538 - DNA, 256 bp, Protomyxzoa rheumatica
catttatttcaaatcttaccattctgtaatcaaattagtttggtccatttgtctggtcactagagacagccatccttgtaattcccaaagacatttctgaaatattcatttgctactgtaaaatatgaaagaggctgtggatattttagctaattttctacagtataaatgagccttagtgtaagtagcaatgacattattctgaaagtttggtaatagataagcccatattaatagtctcctttaggttggtgct

SEQ ID NO: 539 - DNA, 190 bp, Protomyxzoa rheumatica
gtggaatggaatggagtggtgtggaatggatagcaatggaatggaatggattggaaagcaacggagtgtagtggtgtggagtgcaacggaatggaaaggagtgaagtggggtggaatggaatggaatgcaatggagttgaatagaatggaatggaacatagtggaatggaatggaggggagtggaatgga

SEQ ID NO: 540 - DNA, 167 bp, Protomyxzoa rheumatica
atggaatggaatggaatcggacggaatggaatggaatggattggaaaggaatagaatggaatggattcagatgcaacagaatggaacggaatggagttgaatggaatagaaccgaatgcaatgccatcaaatggaatggaatggaatggaatcgaatggaatggact

SEQ ID NO: 541 - DNA, 191 bp, Protomyxzoa rheumatica
gactgccatcggcgcagcgatatggtttttgctgggaagaccggacctgtggggtccaaatgaagcagcaagcatgggacagaagggcgacttcttcggagggtttttgaacccaatcctcactacactcacgtttgcagcatttctcgcaaccgtactgatgcaacgaacagagctgcaagaatctcggc

SEQ ID NO: 542 - DNA, 164 bp, Protomyxzoa rheumatica
ccttccgtttctctccaatccattccattccactccattacacttcactccacttcacggcattccattcgattccattcgttgccattcgattccattccattcgattgcattcctattgattccagtacatttgattcatttccgttcgattccattcgatt

SEQ ID NO: 543 - DNA, 189 bp, Protomyxzoa rheumatica
ggttaattccatgccattccacttttgtccactcctctccattccactccattccattacattccactcccttctattcaattcaactccattcaattcaactccattccaatccgttccaattcattccattccattccactctattccattctattctgttggatttcattccattctattctattc

SEQ ID NO: 544 - DNA, 169 bp, Protomyxzoa rheumatica
cggtttgcttaccgtcgtttttctcaatcacgatcgccttgaacgtgctcatgtcgcttctccgtttaattagaccgatcgtctataaatgcacaaaaaaatagtcctaggctcgggtcattgcgaaaaagccgttcgcaaaggtcctgagcgcatcagcgttgcgttc

SEQ ID NO: 545 - DNA, 141 bp, Protomyxzoa rheumatica
tatggggtagagtatggggtatggtgtgtgtggtgtgtgtataggtgtgtgtgtatgtgtatatggggtagtgtatagtgtatttgtgtgtaggtgtgtatgggatagtgtatatagtgtgtgtgtagtgtgtgtggtgtg

SEQ ID NO: 546 - DNA, 152 bp, Protomyxzoa rheumatica
tccagttactcttttccttgaacttgaacagccctttcagctataggtctttgcactctcatagcttgctggttttgagtctgtcatccagcctatgagttctctgtaaaagagactgtgttagattttcagctgaccattggcacatgcta

SEQ ID NO: 547 - DNA, 227 bp, Protomyxzoa rheumatica
tctaatccattcctttccactccactccactcaatttcattccattccactccactccattccactatactcaattcaactgcattccattccactacactcaactccactgtactccactccattctactccactccattccattctgttccattccattccactcctcgccattccattatatttcattccactccaggcctttccattctactccactccattc

SEQ ID NO: 548 - DNA, 144 bp, Protomyxzoa rheumatica
caaccctagcaggtctagacctgctccctctgggaagtgtacctacagccctggtttcaggaggcttggcgctcttgttctttaggttatttgaggatcttgtctccttgagtagactgtccatgcctggagggcagggctgtg

SEQ ID NO: 549 - DNA, 843 bp, Protomyxzoa rheumatica
ttccattccactccactccactccactccattccattccatttcactccactcaactccattccactccaatccattcggttaaattccattccacttcattccattccattcaattcctttccactccattccactcccctccattccattcctttccattccattccattaccttcctttcattcctctgcattccattgcactacattctaatccactccattctattccattccactccactacactccattccactccgttacattccattccattccaccccactccattccattccattccgttccattcctttccattccattccactccagtctattccattcaataccattccatcccattccattgcattccactccattctattccattccaatccatttcattccgttccattccattgcattgaattccattccacttcactccattgctttcctcttgactccacccatttccattccattcctttccatcccattctattccatcccattctattccattacatccatctgcattccatcacatttcaatacaaacgattccattccactacactcctcttcattccattccattccattgcattccattccattccactctgtttcattccattccattccaatgcattccattccaatccattccaatcctttccaatccactccattccattccattccactccactccactacattctattccattccaatccactccactccattctagtccatttcattccattctagtccacttcaccacatttcatttcattccattccattccattccattccattcc

SEQ ID NO: 550 - DNA, 164 bp, Protomyxzoa rheumatica
ctacggcgagccacgacggggcctctacttcgggagaatcttgccacgaaaaccctcttcctgatgacgattccggccactgtggtggtgaatgtagcaacggatgctcttctttcggtgattctccgtctctctgatcatgctctgtttatcgccagaggatc

SEQ ID NO: 551 - DNA, 141 bp, Protomyxzoa rheumatica
tggaatggaaaggaatggaaaggaatggaatggaatggagaggagtggtgtcgattggggtggaagggagtggagtggggtggaatttagtgaagccgagtcgaacggagtgtatttcagtggaatgcaatggaatggagt

SEQ ID NO: 552 - DNA, 158 bp, Protomyxzoa rheumatica
cattccattccactccacttcattccattccattgcattccattccattccattacaatccactccattcggttccactccaccacactcctcttcactccactcctctccaattttgtccattccattccattccattctattccactccattccat

SEQ ID NO: 553 - DNA, 124 bp, Protomyxzoa rheumatica
tatatatatatatatacatatataactcatcttgaaatatataaaaagaaaactgaatctataaagaaaaatgaatttataaataccataatatatactttgattatggtgtttacggatatat

SEQ ID NO: 554 - DNA, 128 bp, Protomyxzoa rheumatica
ggagtggaatggtatggagtgggatggtaccaaatggaaagaagtggaggggagtggagtggagttgaggggagaggagtgtagtggaatgaaattggatgcaataggatggagtagagtggagagga

SEQ ID NO: 555 - DNA, 157 bp, Protomyxzoa rheumatica
gaatggaatggcatggaatggaatcgaatgcagtggaacggaatggaatggaatggattggagtggaatacagtcgattggagtggaatgaaatgaagtggaatggggaggaggggattggggtggaatggaatggagtggaacgtagtggagtgga

SEQ ID NO: 556 - DNA, 138 bp, Protomyxzoa rheumatica
ggaacatagtagaattgagtgtaatggagtagaatggaatgaagtggagtggagtggaattgaatggaatggcaagaagtggactggaactgaatggggtggagtggagaagagtggactgctgcggagtgtaatgca

SEQ ID NO: 557 - DNA, 160 bp, Protomyxzoa rheumatica
gagtggaatggagtgaaatggagcggagtaaaattgagtgtagtggagtggaatgaagtggaatggaacggaatggaatggaacaaaattgaatggagtggtgtgtagtggagttgagtggagtagaaggaagtgcagtggaatggaatggaatggaatg

SEQ ID NO: 558 - DNA, 128 bp, Protomyxzoa rheumatica
tggaatggaatggaatgcaatagattggaatggaatggaatggaatggaaacaacctgagtggaatggtatggaacggaatggaatggatcggaaagtaacggaatggaattgaatggaatggaatgg

SEQ ID NO: 559 - DNA, 133 bp, Protomyxzoa rheumatica
aacctcttcagtagaaatacaaacctttttttttagatagcttaaggcttcttactggctaacaacaaattatatagctgggttttgaatagaagaacaagtaggccagaaactttcataggctcatttcaac

SEQ ID NO: 560 - DNA, 174 bp, Protomyxzoa rheumatica
gagtgtaaaagaatgcaatgtaatggagtgtagtagaatagaatggaatggaatggaatgaaatgaaatgaaatgaaatggagtggattggagtggagacaagaggaatgcaatggagtggactgcagtggaatggagtggagtggagtggaatggagttgaatgcaatggagt

SEQ ID NO: 561 - DNA, 148 bp, Protomyxzoa rheumatica
cagaaactcctttgtgaagtgtgtgtcaaattcacagaattgaaatattcctttgatagcgcagctttgaaacaccgcttttataggatctgcttgtggatatctggagctctttgaggaatttgttgtaaacgggatatcttcacat

SEQ ID NO: 562 - DNA, 189 bp, Protomyxzoa rheumatica
tccatttcactccattccactccattcacctcaactccgctccactccactgcactccactccaatcccttccattccaccccattccattacattccattccactcctttccattacattccactactttccacttcattccacgccattcccctccacagcattccactccactcccttccaatcca

SEQ ID NO: 563 - DNA, 145 bp, Protomyxzoa rheumatica
ctaagaagacctccagaaagaagaccatcagacttaatcctggatgaaggcgtgggtctgatgaatgaagaagatcccgtgctcatggaggggatgatctgttgttataatgatgtctcttttccccacatgagtccataaatac

SEQ ID NO: 564 - DNA, 131 bp, Protomyxzoa rheumatica
tattctattggtcaacattactaatgattttgttttctctttttagtttttaacatcagatatcattctcttgttttctctttttttggtgtttttttttcttttttcctctaacatagatcggaagagcg

SEQ ID NO: 565 - DNA, 122 bp, Protomyxzoa rheumatica
gaaatgaatgtaaacaatggaatccaatggaatccaatggaatcgaatcaaatggttttgaatggcgtaaaatgaaatcgcaaggaaggcagtgaattggagtcgagttgaatagagaggaa

SEQ ID NO: 566 - DNA, 178 bp, Protomyxzoa rheumatica
gtttgaatccatttcattccatttcgttccatttcattctattccgtacctttccattgaattcatttccttaccattcaatgccattccaatcgggttgattcaatttcattccattctattcgggttgattccatcccattccattccattccattctattccattcaattccatt

SEQ ID NO: 567 - DNA, 153 bp, Protomyxzoa rheumatica
gtgtgcatatggtgtggtgtgtgcactgtttgtggtgtctggggtgtgtgcatgtgtacatggtgcgtgtgcagtgggtgtggtgtgtgtgggggtatgcagtgtgtgtgggggtgtgcatgtgcacatggtgtgtgtgcagtgtgtggtgtc

SEQ ID NO: 568 - DNA, 160 bp, Protomyxzoa rheumatica
ggaatggaatggaatgaaatcaacccgagtgaaatggaatagaatggaatgggatgaaatataatggaatggagtggattggaaacaaactgattggaatggaaaggaatgaaaaggaacggaattgaagggaatggaatggaatggaatggaatggaat

SEQ ID NO: 569 - DNA, 137 bp, Protomyxzoa rheumatica
cgcctcggtcgggaatgggccaatacccaacaatccgttttcactttgcagcatcacatccatgccgtcaggaatgtggttactgaccagagtgggcaatccaatacccaaatttacataaaaaccgtcttgcaatt

SEQ ID NO: 570 - DNA, 270 bp, Protomyxzoa rheumatica
atagaatggagtggaaatgaatgaaatggaaaggaatggagtggattggaatggagtgacgtggaatggattgcaatggactggattggaatggactggagtggaatggagtagattgaaatgaaatgtaatggaatggaatgcaatggaatggaatagaaaggagtggaatggagtgtaatggaaaggaacggatcagaattgaatggaatggaatggagtggaatgtagtggagtggaatggaatggagtggagtgaagtggattgga

SEQ ID NO: 571 - DNA, 147 bp, Protomyxzoa rheumatica
caacaagcgatataaagcacagcacggcagcgaaagatgactacatcgatcaaccaaagccttcaggctaccgaggcgttcatctggtctacaagtatttctcggaccgcaagactgactacaatacgctgaagattgaaatccaga

SEQ ID NO: 572 - DNA, 296 bp, Protomyxzoa rheumatica
tccactccactccactccattccactccacccaatgccactccacttcagtgaattccatacaattccactcaattccattccactcctctccattcaattacactgctctccattccactccattccatttctgtccactccactctactcaactacactccactccattccattgtattcttttccattccattccattccactccattctatttcatttcattccactctactccaatccattcccttcctctccactacactccacaccactccactccgttccattccaca

SEQ ID NO: 573 - DNA, 135 bp, Protomyxzoa rheumatica
gtaatcatcgaatggactcgtatggaatcatcatcgaatggaatcatatgaaattatcgaatggaatcgaatggaatcatcatggaatgaaatccaatagaagcatcgaatggaatcaaatggaatcatagaatg

SEQ ID NO: 574 - DNA, 261 bp, Protomyxzoa rheumatica
ccattccactccattccactccattccactccattccactccattccattacagtccattccattgtatcccattccattccattacaatccatttcactccactccattccactccattccaatgcgttaaattccgtcccattccattctattccattccattccacttcagtccattccattccactcatccccactccattgcgttccactcaatttcattccattccattccattccattcgtttccattccattc

SEQ ID NO: 575 - DNA, 403 bp, Protomyxzoa rheumatica
cattccattccattccactagattccattccagttgtttcaattccattcgagtccattcctttctattccattccattcgagaatgttccctttcagtccattccattccagtacatttcattccaatccattccactcgattccattccaatccattccattccttgcgattccattccttttgattccattccattcatttagattccattccattcgagtccattccctttgagtccattacattcgagtccattccatttgagtccactcaattcgattccattccattcgattccatcccattctattccattccattcaaaggcattccattccagtccattccatttgaatctatgccactcaagtccattccattcaaatccactccattcgat

SEQ ID NO: 576 - DNA, 227 bp, Protomyxzoa rheumatica
cacacacacacatacaacacacatactcatacacacaacacatgcacacacataacatataacatgcaaccatagcacacacataacctacacacacatacacacaacacacacatacacatatgacacacatatgcacatactcatacacacataacacacaagcacacacataacatacatacacaccacacataacagacatgcacataacgcataccatacaa

SEQ ID NO: 577 - DNA, 164 bp, Protomyxzoa rheumatica
tccattccattccattcctttccattccattgcattccatcccattccattccattccccttgggttttttcaattccattcgattccatcccattctgttccattcctttacatgtcattccattccattcctttccagttgattccattccaatccattcca

SEQ ID NO: 578 - DNA, 178 bp, Protomyxzoa rheumatica
tatggagtggaatgaaaaggaaaggcctgaggtggaatgcagtggggtggaatggaatgtagcggagtggaatggaatggagttgagtggaatgtgttggagaggactggagtgtagtggagtcgagtggagtggaatggaatagagtggagtggagtagagtaaagtggaatggaat

SEQ ID NO: 579 - DNA, 128 bp, Protomyxzoa rheumatica
aagacagacacagtgagagagacaggcagagagagagagaaataggcaaagagagagagacagagaaagatagaagacagataaagagagagagagagacagagagaggaggaggaagggcatgctca

SEQ ID NO: 580 - DNA, 164 bp, Protomyxzoa rheumatica
cactccactccattccattccactccacttcactccactcaattccattccactccactccattccattccatttcacccctttccactcgaccacactccactccactcaattgaacttccctccattccattccactccccttccactccgttgccctccat

SEQ ID NO: 581 - DNA, 404 bp, Protomyxzoa rheumatica
ggaatggagtggaatggaatgaagtggagtggaataaaatagagtgaatgggaatggagtggaaaggatggaattgaagggagtggaatggagtggaggggaatggaatggagtgcagttgagaggaaagaattgcagtggagtggaatggagaggaatggaataaagtggagtggagtggaattgagtggagtcgtgtggaatggagttgagtggagtacaatggattggaagggagtggagaggaatggaatggaatgaagtgcactggaatgaagtggagtggaatggaatggagtggagtggaacggagtagagtggagggcaatggagtggaatgaagtggactggagtggagtagagtggaatggagtggagtggaatagggtggagtggagaggagt

SEQ ID NO: 582 - DNA, 135 bp, Protomyxzoa rheumatica
gaatagaattgaattatcgaatggaatcaaatggagtcatcaccatatagaatcgagtggaatcttctaatggactccaaagtaatcatcagggaatggaatcaaatggaataatcctctaatggactcgaatgg

SEQ ID NO: 583 - DNA, 130 bp, Protomyxzoa rheumatica
tggattggaaaggagtggagtggattggagtggaatggaaaaaaatggagtggacttgaatgaaatgcagtggagtagatgggagtggagtggaatggaatggagtggagtggagtggagtggaatggaa

SEQ ID NO: 584 - DNA, 204 bp, Protomyxzoa rheumatica
gaggccttctttggaaacggggtttcttcatataaaccctgacagaagaattctcagaaacttcactgtgatgtgtgcctttaactctcagagttcaaccttctttttgatagaagagtgttgaaatattccttttgtaaaatttccaagtgaatatctagagcggttttaagcctatgtagaagagaaactatcttcacagaa

SEQ ID NO: 585 - DNA, 134 bp, Protomyxzoa rheumatica
agtggaatggagtggaaaggaatggagtggagtggaaaggaatagattggattggagtaaagtgcaatggagtggagtggagtggagtgcaatgcaatgcagtggagtggagaggtgaggaatggaatggagtt

SEQ ID NO: 586 - DNA, 220 bp, Protomyxzoa rheumatica
gaatggaatagaatcaactcgagtggaatggaatggaatggaatgcaatagaatggaatggaatggaatggaaagtaatggcaaagaatggatttgaatggagtggaaagggatggaatcaacgcgagtggaatggaacggaatggaatggaatcaacactagtggaaagaaatggaaacaaaaggagtggaatgaaatggaataggatgtaatcaaccc

SEQ ID NO: 587 - DNA, 181 bp, Protomyxzoa rheumatica
ctccacaccattctattacactccattccaatccattccattccactccaatccattccgctccattccattaaactgcaatccattccattccactccattccactgtattccactcgactcctctcccctgcactgcactccattccattccattccactccactccactccattccat

SEQ ID NO: 588 - DNA, 185 bp, Protomyxzoa rheumatica
gtggaatggaatggagtggagtggagtggaatggagttgaatggactggaatggaatgttgtggagtggagaggggtggagtggtgtgtaacggactggagtggaacggagtggaatggaattgagtttagtggaatggagtggactggagtggaatggagtggaatggaatggagtggagtgga

SEQ ID NO: 589 - DNA, 159 bp, Protomyxzoa rheumatica
ccaatccaccccattccattccattccattccactccattccattctagtctactccatttcattccactatactctgttccaatccattccattccattgcattcaatactattcccttccattccattccattccactccactccattccattcctc

SEQ ID NO: 590 - DNA, 132 bp, Protomyxzoa rheumatica
ttcattccattctagtccactccactatactccactccattcaattttattccttctcattccattgactccattcgaatccaattcactccaatacattcaattccattctaccccattcctttccactcc

SEQ ID NO: 591 - DNA, 155 bp, Protomyxzoa rheumatica
gtcgcccttttggctcacctgcatggcacccaaaatggccaagttaatgtgcccgccgcgaatcattgcgaaagactccgagctggaaaagaatgccgacccatccagtgtagtcacggtttgcttgcccgcattgatcaaatccgcatccacct

SEQ ID NO: 592 - DNA, 172 bp, Protomyxzoa rheumatica
attccattccactccattccactccattccatacgattccactccactcgactccactccattcctttccattccattcaactcaactccaaacaaatccactcccctcgattcctctacattccactctattccactccaatccactccactccactccattccattccat

SEQ ID NO: 593 - DNA, 129 bp, Protomyxzoa rheumatica
gaatcaaaaggaatcgaatggaatccattggaaaaaatggaatagaatagaaacgaatggcatcgaattgaattgaatggaatgaggtgaagtggagtggagggaaatggagtgggatggaatggagtg

SEQ ID NO: 594 - DNA, 192 bp, Protomyxzoa rheumatica
ggagtagaatggaatagagtggaatggagtggattggaatggagtggaatggagtggaataaaaagcagtttagtaaagcggagtggaatggagtggaatggagtgaaatggattggagtgtagtggagtggagtggaatggaattgattggaatggaatggaacagaatggaacgaaatggaacagaatgg

SEQ ID NO: 595 - DNA, 160 bp, Protomyxzoa rheumatica
tcatcaaatggaatcaaatggaatcatcatcgaatggaatcgaatgaaatcatcatcaaattgaatctaatggaaacatcatcgaaagtaatctagtggcattatcatctaatggaatctaatggaatcatcaatgaatggaatcgaatggaatcatcga

SEQ ID NO: 596 - DNA, 126 bp, Protomyxzoa rheumatica
aatctttttacttaaacactatccactctttttctgcaattcttttttttttctttacattacaaaacaaataacattttattgagagacttagaaagaatctttgaaacataaccaatttggttt

SEQ ID NO: 597 - DNA, 220 bp, Protomyxzoa rheumatica
atagggatacaagtttcttttagggtggaaatccttatatataagtgtagggactactcaccaaaatcaaacaactcacttcaatttgtaacggtttaaactcggtacaatatgcggattttgattcggtataatgacattaaaacaccactttaacaaaaaccactagacaaatattagtcatttcggttcagtttcgtttaaaaattacgaattttcg

SEQ ID NO: 598 - DNA, 151 bp, Protomyxzoa rheumatica
tccattccattttattccattccattagtgtccattcctttcgattacattccatttgagtccattccacaggattcctgtccattcgaatccattcaatttaattcccctcagttcaattcctttcccttcaagtccattcttttccatt

SEQ ID NO: 599 - DNA, 223 bp, Protomyxzoa rheumatica
ccattccattgcattcgagtcctttccattccatttcattcgtgtccattccattccattccatttcattcgagtccctttcactccattccattcgattccattcgagtctattccttaccattacattccgttctactcgagtccatttgattccattccattcaaatccattccactccattccattcgagtccattccattccattccattccattaaa

SEQ ID NO: 600 - DNA, 210 bp, Protomyxzoa rheumatica
agaatagaatggaatggaatggaattgaaaggaatggcatggattggaatggaatggaatggaaaggaatggacttaaaatggaaaggaatggactcgaatggaatggaatgaaatggaatggactctaatggaatacagtagaatttactggattggaatctaatggtatggattctaatgaaatggaatggaatggaatcgaatggaa

SEQ ID NO: 601 - DNA, 234 bp, Protomyxzoa rheumatica
cattccattggattgcattccattcaattccaatccattccatcagattccactccactacattccattccattgaattctaacaaaattccattccattccattccactccactccatccctttccactcaactcagctcctctccattacattccattccactccactcaactccattccaatccactccattccactccactcaactccattccactccattccattccac

SEQ ID NO: 602 - DNA, 232 bp, Protomyxzoa rheumatica
tctaaagttggataacaattggttatcaatcaatgttttctttaaccacattaagaatcaaagtcataacaaccatattatctagataatttcagaaaacattaaaaaatcaatacccattctttactaaaaattactattaaactaataatatgagagtccttttaaattatttaactaattaattaataattttgaggcagggtttcactctgtagccagggctggagta

SEQ ID NO: 603 - DNA, 299 bp, Protomyxzoa rheumatica
aaccaattctgccacatgaccaagtggaagttttcactgaggatgggcgtccgctcatcaactcgccatttacggcaccggaccgtctgagcgagatcattgatggtatcgatctgtgtagcagtcgtatccttgagatggggccgctggatcgcccattgctatcaaaaaccgctgccaccgtgagctatgtcgaccatgctagccgcgctgatcttctgaaaaagtatgagggcaccggcacggcaggaactgtatcgcccgctcacatcgccgaaatagacatcgtatgggatggg

SEQ ID NO: 604 - DNA, 148 bp, Protomyxzoa rheumatica
attccattccattctattgctttccattccattccattcctttccattgcattcgagtccattccactccagtctgttccattctagtgcattccattccagtccattccatttgagtctattcgattccattcgatatcattccatt

SEQ ID NO: 605 - DNA, 199 bp, Protomyxzoa rheumatica
agaggaagggagtggagtggaatgaaatggagtttaaagaacggagtagaatggaacggaatggaatggagtggagtggataggaatggagtggaatggaatggatagaaatggaatggattggagtggggtggaatggaatggagtggagtgaagtggaatcgaattataatgaaatggagtggaatgcagtggagtg

SEQ ID NO: 606 - DNA, 155 bp, Protomyxzoa rheumatica
gtgtaatggaatgtaatggaatagaatgaagtagagtggagtggagcgtaatggaatgtaatagagtggaatggattggagtagaattgaatgcagtggagtggaaaggaatggaacggaatggaatggagcggaatggcatggagtggagtgga

SEQ ID NO: 607 - DNA, 137 bp, Protomyxzoa rheumatica
gtggaatggaatagaatggaatggagtggattttattggaatggaacagaatagaatgaaatggaatggaatggtatggaatagagtggaatgcatttgggttgaatgcagttcagtggaatggattggagtggatt

SEQ ID NO: 608 - DNA, 132 bp, Protomyxzoa rheumatica
tggctgggttgggcatggttcggctcacgtatctaattagatattcaggaagcgatccgttgccgattagcgattgtatctccgttagcttcgttatgggcggcttggcagatgcaataatcttttcgatgg

SEQ ID NO: 609 - DNA, 144 bp, Protomyxzoa rheumatica
cattcaattccattcctttcgagtccattcaattcggttgatttccattggagtccattccattccattacattcttttcgtttccattctattccattcctgcccattccactgcattccattgcattcgaacccatttcttt

SEQ ID NO: 610 - DNA, 160 bp, Protomyxzoa rheumatica
ttccttccttccttccttccttccttccttctctctctctctctttctttctctcatcttcagacaatgctttctccctttctttctctttctctctctctctttctttctcattttcttgagacagagtctctctctgtggcccaggctggagtgcagt

SEQ ID NO: 611 - DNA, 225 bp, Protomyxzoa rheumatica
gaatggaatggaatggagtggagtggaatggaatggaatggattggactgaaatggagtggagtgtagtggaatggaatgcaatggaataaaatggaatggaatggacaggagaggagtggagtggagtggaatttaatggagtggaaagtagtggagtggagtaggttggaatggaatgtagtgcaatggaacagaaaggagtggaatggaatggaatataatg

SEQ ID NO: 612 - DNA, 325 bp, Protomyxzoa rheumatica
ccgagtggaatggaatggaatagagtggaatggaatggaacggaatgctatggaatcaactcgagtggaacggaaaggaatggtacggaatggaatggaaaagaaatgaatggaatcaacaagaccagaatagaatccaaaagactggaatgaacaagtgcaatggaatggaatggaatgaaatggtatcaacccggttggaatggaatggaatggaatggaatggaatggaatgaatccgagtggagtggattggaatggaagggtctttaattgaatcagcccgaccggaatggaattgaatggaatggattgaaatggaatg

SEQ ID NO: 613 - DNA, 290 bp, Protomyxzoa rheumatica
gagtccattccattccattccattcgaatccattccactctattccattcaagtcaattccattccattccattccactcgagtcctttccattccattcgagtccattccattccactccattacttttttccattcctttcctccattcctttccattacagtccattcctttgaattccattccattccattcgtgtccattccattagagtccattccatttcatgcaattacattcgtgtccattccattccattccacttgagtccattccattccattccatt

SEQ ID NO: 614 - DNA, 125 bp, Protomyxzoa rheumatica
ccattccattccattccattccattgcacacaactcctttccattccatttccctcaactccatttcattccactacaatccactccagtccactaaatttcacttcactccaatccattccatt

SEQ ID NO: 615 - DNA, 186 bp, Protomyxzoa rheumatica
gaatggaagtgaaaggaatggaatcgaatggaattgaaaataatagaatggaatggaatgtattggaaagatatcaaatggaatagaatataagcgaatggaatggactggaatagtatggactcgaatggaatgcattttcgtggaatggacacaaaaggaatggaaacgaatggaatggaatgg

SEQ ID NO: 616 - DNA, 370 bp, Protomyxzoa rheumatica
tctactcccctccacttcacttcgttccattccattccttgccattccattccattccgttttattccattccactccaatccattccaattaactccactccgttccactccactcgatgccattccactccactcgattccatttaattccactccacaccactccccttcatttcactccactcttctccactcttatacactccaccccaatccattccactccgttagtttctattccaatccaatccactacattcttgtccactcgattccattccactccattccattccaatcctttcctctccaatccattcccctccactccactggactccacaccattccgttccactccaatccac

SEQ ID NO: 617 - DNA, 228 bp, Protomyxzoa rheumatica
gagtggactggaatggaatggaatggaatggaatggaatgagacgaagtggaattgaatggagtatagtggaatttagtagtgtggagtggaatggagtagagtggaaaggagtggactggaaaggaatggagtggtgtagaatggattggagtggaaaggaattgaatggaatggaatgaattggaatggattggaatggaattgcatggaatgaaatggaaacagt

SEQ ID NO: 618 - DNA, 475 bp, Protomyxzoa rheumatica
attccattccattccattccattccattccattccattcatttccattccatttgatgctattctgttcgattctcttctgttaggctccaatcctttcgagtccgttcgattccattcctatcaatgcaattctattagattctattccattcgactccattacattccattccgttccatccgattcctttccattatattcctttccattccattccatgccattccattcaattcgtttccattccattggatgccattcctttcgattctattccattcgaccccattccattccattgcgatgcatcagattccattccattccattcctttgcattcctttccattccaatcgtctccatgacattcgagtccactccactcctcttcattcccatagagtccattccattccagtccattccattcgcgtacattccattcaattccattcgatatcattcgattaa

SEQ ID NO: 619 - DNA, 129 bp, Protomyxzoa rheumatica
gttagacatgaaagtgcacttatttcctgaaataatcttaggtgagcaaaagtaactaaatatagaagagagttgggtccataaataagctaatcgcctctatgaatatttgtatctcccctagaaaat

SEQ ID NO: 620 - DNA, 193 bp, Protomyxzoa rheumatica
tgggtagagtgtaatggaattgagtggagtggacagcaaatgaatggaatggaaaggaatggaatggaatcaatggaattgattgcagtggagtggagtggagtggggtcgagtggaatgaaattgaataaaatagaatgcaatggaagggaagggcatgcagtggaggggaatggaatgcaggggaattgcg

SEQ ID NO: 621 - DNA, 168 bp, Protomyxzoa rheumatica
cacacatgcaagcaacacccaaacatacacacaatatacacaccacacacacacaccacatacacaaactccacacatacataccacacacaacacacacaaataacacacgcaccacacatcacacacatcacacaaacacaccatacacacacaccgcacacaccc

SEQ ID NO: 622 - DNA, 214 bp, Protomyxzoa rheumatica
gagatgatggagaagctggagatcatggagatgatggagaagatggagatcatgaaaatcatggagaagatggagatgatgaagaagacggagatgatggagaaggtggagatcatggagaagatggacaacatggagaagatggagatgatggaaaagttggagatgatgaagaagatggagatcatggagaagttggagaggatggacatga

SEQ ID NO: 623 - DNA, 172 bp, Protomyxzoa rheumatica
tccattccattcaattccatttcattccattccattccataccactccattcttttccactccattccaatccgtcccatgccactccattccattgcactcctctgtattccattcatttctactccattcaattccactccattccattctactccactccactcccatc

SEQ ID NO: 624 - DNA, 453 bp, Protomyxzoa rheumatica
ttcgattccattccattccattcctttccattccattctcttccacttgactccacctcactgaaatccactccacttcattccactgaattccactccactccactccattccattccactctactgcattccattccacttctctctactccactccactccattccaccccacactgtttcactccactccactccattccattcaactccactcaactccattccaatatattccattccattccattccactccactccatttcgtttcattcaattccactccataccgttccactccatcccatttaactccatttcattccattccattccatgcaattcctctccactccactcttctgcacatcactccactccattacatcccatcccattccactccactctattccactccattccattccatatcattccactcaattc

SEQ ID NO: 625 - DNA, 286 bp, Protomyxzoa rheumatica
tattccattccattccattccattccattccattccagtttattcctttccattccattccattccattcaagttgattccatttaattctattgcacttgaggccacattattccattccattcaattccattctattgcattccattccattgcattccgctcctttccattccattccactcgagttgattacattccattctgttgcattcgaggctatttcattccatttctttccattccattctattgcattgcattccattccattccattccattcc

SEQ ID NO: 626 - DNA, 218 bp, Protomyxzoa rheumatica
atggaatggaatggaatggaatggaatagaatggaatggagcagagaggaatggaaaggaatggaatgcaatggactggaatggagcggagtggagtggaatggaatagaatggagtggagtgccgtggaattgaacggaatggagtggagtggaatggagtgcagtggaatggcgtcgagtggagtggaatggaatggaatggaatggaatggaatg

SEQ ID NO: 627 - DNA, 127 bp, Protomyxzoa rheumatica
cattccattccatcgctttccattcaagtccattcaattgctttcaagtccattccatttcactctactccattccatttcactgcattccattcccttccatgcgttgccattcaattctattcca

SEQ ID NO: 628 - DNA, 143 bp, Protomyxzoa rheumatica
tccattccattccactccactccaatccactccattccattccactcaactacattcctatccaattctctccactccattcgactccactccactccactcaattccactccaatccattcaattccactccactccactcc

SEQ ID NO: 629 - DNA, 251 bp, Protomyxzoa rheumatica
ttccattgcaatcgagttgattccattgcattccattccactctattccattccattccattccaatccattccattccgaatgattccatgccaatgcattcctttccattccatacccctgcactcaggttgcttccattatattccattccattccattccattccattccgtcccattccattccattccaattcaatagagtttactccattccaatccattccattccattccattccattccat

SEQ ID NO: 630 - DNA, 122 bp, Protomyxzoa rheumatica
tcgtccttttattgactttttgactgcattatttttttcagtgttttctcttaaaattattatatccatttttatttttatggtctattctgatgtaagatggtgtgacttcatctacagta

SEQ ID NO: 631 - DNA, 141 bp, Protomyxzoa rheumatica
ttcttctcattgttccatttcgtcatttcatcatttcatcatttcacttcacctcatttcatcatctcatgatttcatttcatttcatcatttcatctcatttcatctttttgtctcatcatttcatcatttcatttcatc

SEQ ID NO: 632 - DNA, 161 bp, Protomyxzoa rheumatica
ctaattgaatgcaatataatggaatggattggaaaggactcgaattgaacagaatggaatggactcgaatgaaatggaatgcaatggaatggactcgaatggaattcaatggaatggaatagactagaatggaatggaatacaatggactcaaatggaatg

SEQ ID NO: 633 - DNA, 2195 bp, Protomyxzoa rheumatica
ctggggggcatcttaaatactatatattttggcgggtttttcgtcggaaacgcgttaaacttttcgtaagaccccgggaaaaaaaggcctttgctcgcatatctcactttttcgaaaaaacgcgatttttgacgatttttggccatttttgaccaaaaaacccgttttggcctcatttccggaggtaaccccattccggcccctttccggctgtaccgcgttcattctggctgccaaccttacaggctatcgagtgtgctgtccgataatattccattcgtgtataaacttatttcatatacatctcctcacgtattatagtactcatgtggacgaaaccacaatcgttatgataacggcacacacttcgggcccgcaaacgcaacgctaacctacaagcggctggtattaactccgtttcggctaccctccagtggcttatggtgaagcgaagaggtagaaatgccaaaaatcaggaaaaaacgccctcgatgacccctttttttagcgattttcgagtattaacgcctatcctctcaatctgtgacctacttaacccggtcaaaccacttactgttatgtgcgtattttgacatgggaagtcttggtcacccgtctgcgctcatcctcggaggtctccgcccgttccttcgacggcaaccctctaaggcaatcgcctcctcgacagcccattcctacggatatggccggaattatccctatctgcccgtgctagaacgctcaaattcctttacctgctcgtgaaagctcaggtactccccaacagcctctgtcgtctctaaagtcctcgtcgtcagttagccgtaacatcggtttcacgtgcctccgtcgttccttcggctcacttgggtcgcctggtcactctgtaactgagctcatctggtctatttctcccgcgccagactactcctctgaactcggacgctgtttccattcactcccctgatcgactacgcgcaggtcccctctgaaaaagtcctgcaccgggcaaggcctaacggcccctcaatcccagatgatcgtctcatggatccccggaccgaggcgagtcactcgtgaggtctgcccactcctctacgttcgttaaatttttttgtaatatagtcgtacgaactgagctgctccggcatgggtctgcttcttggtagtttccattcgcaagaaacgtccatcgaatacccgcccattcgaccggtcgcggttctacttagttcctcccactcgcgcttcttgcacctccttttgagaatggttattttcaggataggcactcctcaacagttatgatattcctgtctcgtcgttgtattttttatttttctttctttaggaaacgctcttctgctatttgactaatcagtcgagtgctttttctcgttgaaagctccttcatttccgattttatttttacgctcgccaagtctcgtcactctcgcttaaactctctcaggcgtgacgtttttcaattttgaaaaaattgacaaaaaacgtcgatctcagcgcccttgaggtgaaaaatgctcgagttagtcgcaaaaaacctaaaatcgattcgacacgcttcgctaatccccacgcactcgacaatgttcgaaaaaaaattatgcgtaaaaaaaaaaaataatttataattcaaaccttgtactctgcgaagccggctaagctccatctatctgcggactatctggatccacaactctcccgagactccgttggctatgtgctcccactccacgctcatttgcacgctacattcgacttcacgaggtcgccagccctagtgcgcgcattgcccaaattaccggcaaaataggggtctgggatttctctgtatatggctcttttctgagaggggtttactctacgaagtccagacgtttcggaggtcctttctaaattttttttcccgtacttatgtactcagccttcgcctatggctcgaagcaccaggcccatcccttatttggccggtcacctgatcaatgcagctcgaggttccatttgaccacacagatcctttcagctcggccctaggggtcctacttccactctcggtcatgagacatcggacatgggcccgtctgtatatgcacgacactcaccactcgcccggctcgctcatagcgtcaacaccataacagatgaacgggtcacagtggtctaggagcggctac

SEQ ID NO: 634 - DNA, 464 bp, Protomyxzoa rheumatica
tccattccattccattccattccattccactccattcaactccattccacggcattccattccacaccactaaactccattacactccaatctattccactccactcaactctattccactccattccattcctctccattcctttgcactacactccattcctctccattcctctccaatgcattccaattcattcctttccacaggaatccattcgattccattccactccactccatcccactccattgcattccactcacctccaatccattccgctctattccattccactctactccattccactccattccattcccatctattccatgctattatattccactccattcgattccaatgctttcgttccatttcattgcactcccctccatcgcattctattcatttccattccaatctattccattccattccattcaattccattccattccat

SEQ ID NO: 635 - DNA, 204 bp, Protomyxzoa rheumatica
attccactggagtccattccattcaagtctttaaattccagacaattgcattggattcccttccattctattgcaatcgattgcattccattccattatattctattccattcgattcgattccattctattcccttccattccattccagtctattccattcttttccattccattcgattctattgcattccagtgcaatcg

SEQ ID NO: 636 - DNA, 130 bp, Protomyxzoa rheumatica
tccattacattccattccatacaacttgtgttgattccattccttcgcattccattccctaccattccattccattccctaccattctaacacattctctaccattccattccattccattccattccat

SEQ ID NO: 637 - DNA, 142 bp, Protomyxzoa rheumatica
cactacattccactccactccactctactccaccacactccatgccattccactcctttcgttcgacaggatctgcatctgtcacaaaggacgtagcacagtaacacaatctcagctccaattgcattccattccattgcat

SEQ ID NO: 638 - DNA, 135 bp, Protomyxzoa rheumatica
tccattccattcgattccattccattcacatcttttccattcaattccactccactcgattccagtccgttccattccattgcattcctttctattccattccattgcgtaccattccattccattttattacat

SEQ ID NO: 639 - DNA, 353 bp, Protomyxzoa rheumatica
ggagaggaatggagtggcgtggagtgaaatggaggggagtggagtggagtggattggaatagagaagagcggaatggaatggagtgtaagggaatgcactgcaaaggactggagtggaaaggaattaaatgaattttaaaggaatgcaacggaatagaatggagtggagaggaatggaatggagcagaatggagtggagtctaatggaatggaatggagtggaggggaaaatatagaatggaaaggtgtggagtggaatggaatggagtggagtggaacggagtggagtggagtggaggagaactgaattgagtggagtgaaatggaatgaaatggaatggagtggaatggaa

SEQ ID NO: 640 - DNA, 143 bp, Protomyxzoa rheumatica
tggaatgtactcgactggaataaaaacgaatggaatggaatagaatggaatggaatcgaatcaaatgatcatgaatggaatggacaagaatgcaaatttctcgaatggaatggaattgaaaggaatggaatcgaatgtaatgg

SEQ ID NO: 641 - DNA, 171 bp, Protomyxzoa rheumatica
gaatggaatggactcgaaagcaatggactggaatggaacgatcttgaatggaccggaatcaaacggaacggaatgcaatgcaaggcaatcaaatggaatggaataaaagagaatgaaagagaatcaaatgcaattgaatcgaatggaatcgaatggattggaaaggaatag

SEQ ID NO: 642 - DNA, 194 bp, Protomyxzoa rheumatica
attacattccactccattccacttaagtccctttcattcaaccccattgcactcctctacagtacactcttctcatctccactcaattccattccattccatttcgttccattccaattcactccactccactcctatccactcaactccagtccattccaattcattcctttcctttcgattccactccactc

SEQ ID NO: 643 - DNA, 130 bp, Protomyxzoa rheumatica
ggcttcaatttcctcggagtcgatgtaattgatgttcaccttggttcgtgtgtgcaagccagcatgattcaaggcttcgatcagggatttatacgactcggtcaaatcgacgtacttgcccaccatgcca

SEQ ID NO: 644 - DNA, 201 bp, Protomyxzoa rheumatica
agcgcgccaagatttccatgttctcgaatgtgcaactggaagctgttatttccgtttgggacgctgacaccatttacaaaattccagccatgcttgaagcccaaaagcttgatgacattgtgctggaaaagctgaacattgaagcgcctcgcgcagatttgtcgaagtgggctgaaattgtacatgcgcaggaaaatcccg

SEQ ID NO: 645 - DNA, 231 bp, Protomyxzoa rheumatica
tgctctgatgctgcatgcacatatatttataattgtcatattatcctggagaattgactatgctcttattatgtagtgtctttttttgtctcttgtgcacattttttacttaaagtctcttttgtcttatataaatatggccacctctgctttcttttggtaatcatttgcatagaatatctctcttccattatttcactttcagcctatgtgtgactttacagctaaagt

SEQ ID NO: 646 - DNA, 148 bp, Protomyxzoa rheumatica
gaaaatcacaaaaaataagaaagatatcaaagcatgtcactccaaaaaaaaaccccaatgaaatacaaaaaaagacacaatgaaatacaaaaaaagatagcaatagaggaaaatagagatggattaaactttgcacccaagaaacata

SEQ ID NO: 647 - DNA, 128 bp, Protomyxzoa rheumatica
tctacggctcatttctctggtcagaacgccgcatccaattctccgcttttcgaaaggaccaggtttgacggcatccgcgagagccatcgttcgatcattgctgatcgtttgggcaattctggcgacca

SEQ ID NO: 648 - DNA, 168 bp, Protomyxzoa rheumatica
tccattccactcaggttgattcagttccattccattccattccattccattctattccattccaatgcgttccattccactcgttttgattcagttacattcgtttccatttaattccataccattccattacactccattcctttccattcaattccattccattcg

SEQ ID NO: 649 - DNA, 145 bp, Protomyxzoa rheumatica
attccagtacattccattccattccattccattccattgcattgcattcttgtccattccattccatttgagtctattccattccgttccactggagtccattccattcgtttccagtccattccattcaagtccattccactct

SEQ ID NO: 650 - DNA, 347 bp, Protomyxzoa rheumatica
aatggaatgaaatggaatgcaatggagggaagtggagtggagtggcattgagtggaggggaatggattggggtttaatggaatggaatggaatggaatggagagaaattgaatggagtggaatggaatggaatgaactggagtggaatggaatggagtggagtgcaataaaatggaaaggagtagaatggtttggaatggagtgaaattgagtggattgtagtggaatggagtggactggagtggaaaggaatagactggagtggaatggaatggagaggaatggaagctaatgaaatggagaggactggaatgcaatggaatggaatggaacggaatggaatggaa

SEQ ID NO: 651 - DNA, 157 bp, Protomyxzoa rheumatica
tggaatggaataaaatgaaatggagtggaaagtaatggaatggagaggaatggaacggaatggaatggaatgcaaggcaaaggaattgagtggagttcagtggagtggaattcagtggaatgaaatggaatggactcgaatggaatggaatggaatg

SEQ ID NO: 652 - DNA, 153 bp, Protomyxzoa rheumatica
gagtggaattgagtggagtggaatggaatggggtagagtggaatggaatggacaggaatggaatggaatgttgtggagttcaacggagtggagtggaattgattggagtgtaatggtacggaatggagtggaatggaatggagtggagtggaa

SEQ ID NO: 653 - DNA, 180 bp, Protomyxzoa rheumatica
atggaatggaatggaatgcaatggagtggagtggagtggagtggagtggaatgtactggaccggaatggaatggaatggaatggagtgggatggaatggtgtagaatggaatggcacagaaggtagtggaatggaatgcagtggaatggaatggactggactggagaagaatggattgga

SEQ ID NO: 654 - DNA, 224 bp, Protomyxzoa rheumatica
gttccattccattcaattcgagtcaattccatttcattccattccattgcagtccattccgtttcaacccattccattcgagacaattccattgcattccactctattcgaaatcattccattctattccattcatgtatattccattccatttcattggattccactctgttagagtccattccattaaattccgttcctttccatttgagacatttccattc

SEQ ID NO: 655 - DNA, 351 bp, Protomyxzoa rheumatica
gagtggaattgagtggagtggagaaaagtgcagtggagaggggtcgagtggatgggaatggaatggaatggaattgagtgtaaaggaatggagtggagaggaatggaatggaatggagtggtgtggaatggagtggaaaggaatggaatggaatgcaatgtagaggagtggtgtggtgtggaatggaatggagtggactgggatggaatgaaatggaattgaatttaatggaatggaatggaatggagaggatgggagtttagtggaatggaatggagtggaatgagtggagtggaatggaatggaatggaattgagtggagtggagtggaatggaatggaatggaatgga

SEQ ID NO: 656 - DNA, 128 bp, Protomyxzoa rheumatica
atgaaaatgttaggaaaaagatgatgtaaacaattactattttaaaaattttaaataactttctgtcttctatcataaccatattggattatgctcccctcctggttcaaacagtcataataggccta

SEQ ID NO: 657 - DNA, 180 bp, Protomyxzoa rheumatica
gaatggaatggaatggaatagaatgaaattgggtggactggaatagattggaatggaaaggaatggaatggactggagtgaactggcatcgagtggaatgcaatgaaatttagtatagtggaatggaatggaattcaataggatggaatggaattgaatggaatggaatggaatggaaag

SEQ ID NO: 658 - DNA, 178 bp, Protomyxzoa rheumatica
atggaatggaatggaatggaatggaatggaatcaacacgagccgaatggaagattggaatggaatttaatggaatggaatagagtcaaccgaagtggaatggaatggaatggaatgaaatggaatcaatcggagtggaaaagaatgtaacggaatggaaaggaatggaatggaatgga

SEQ ID NO: 659 - DNA, 122 bp, Protomyxzoa rheumatica
tgcattgctttacaaagttaagaaactaattttaaaatagaaggtttgaagactaaacttaagaggaggagaaaaggagtcctgctaatccaataattagagtagttagtcaaggattacag

SEQ ID NO: 660 - DNA, 202 bp, Protomyxzoa rheumatica
tggaatagaacagaatagactcgaatgtaatggaatgcaatggaaaggactcgactggaatggaatggaatggactcaaatggaatacaatggactctaaaggaatggaactgaatgcaatggaatggactcgaatgaatagaatggaatggaatgacctcaaatggaaaggaatgcaatggaatggactcgaatggaatgg

SEQ ID NO: 661 - DNA, 168 bp, Protomyxzoa rheumatica
ggtatgtggtgtgtgtttaatgtgtgtggtgtgtgtgtgtatactgtgtgttgtgtgtggtttgtatatgtggtgtgtgtagtgtgtggtatgtgtatagtgattgtgttgtgtgttgtgtgtaatgtgtgtgatatgtataggtatgtgtgtagtgtgtgatgtttg

SEQ ID NO: 662 - DNA, 534 bp, Protomyxzoa rheumatica
acacactacaccacacacacgaatctactacacacacaacatacacatacagcaccacacacaccccatactccccacacacatcaaacacacgccccacacatactccccacacactgcacacgtatatatagcaccacacacacagagcacacacatcacatacacaccacacatactgtgcacacacacaccacacattctacactcatcacacatcaaaccctacacacagtacacacacacccagcaccatacacaaacacatcacataaaccacaaattgcacacacatatatcacacacacaccacaccacacgtagtacacacacaccacacccacatacaccacaaacacagcacatatacacaccatgcaccacccacaaactacacacggtatacacacataacacccacaatacacaccacacacatacataccccatgaacctactacacacacagaccacatacacacaccatacatacacatcacacacatacacctgcgcacacctcacagcatacat

SEQ ID NO: 663 - DNA, 375 bp, Protomyxzoa rheumatica
tggaatggaatgaaatgcaatagaaaggactggaatggaatggaatggaatggaatcaaatcgaatttaatggaataaattagaatgggaccgaatggaatggactggactggaatggaatggggtggaatatactcgaatggaatggaatggaatgggctcgaatggaatggacccgaatggaatggaatcaaatacaatggaatgcaatggaacagaatagaatggaatggaatggaatggactctaatgtaatggaatggaatgttatggactccaatggaatggattcgaatggaatgtactcgaaaggaatggactcgaatggaatgcaatcgaatggaatggaatctaatggaaaggaattgaatgaaa

SEQ ID NO: 664 - DNA, 192 bp, Protomyxzoa rheumatica
aagggatctgtgatgatgatgatggtaatgataacatttcctgagaactggttttgggttttatattctttacctcctttaactctcacagatcccttattaagagttgcttggtggaacaacaatagtaccccacaaacaacattggtgcagctctctactgaatatatacatgctcaatcaacctcctca

SEQ ID NO: 665 - DNA, 130 bp, Protomyxzoa rheumatica
cttttgtgatcagcgccgcgtcttcggattcgaaggcttcggtcaggtaggccgcgatcatgtccgggctatcgagataatcagcggcgtcgaagagatcgaagctcatcatatcaaatctagcccgcat

SEQ ID NO: 666 - DNA, 141 bp, Protomyxzoa rheumatica
attccattccactccactccactccatgcaattccatttctccccattccattccatccgctcctttccactctactccactacattaaattccaatccatccaattccgttccactgtattccaattcactcttctacac

SEQ ID NO: 667 - DNA, 127 bp, Protomyxzoa rheumatica
tacagtggaatgaaatggaatgaatggaaatggaattgaacgtagaggagtggagtggaatagaatgtaatagaatggaatggaatgaattagaatggaatgtagtggagtggaatggagtggagtg

SEQ ID NO: 668 - DNA, 214 bp, Protomyxzoa rheumatica
ccattccattccaatccattccattcccttctgctcctctccaatccattccaatccatttcactccacttcattccactctactgcaatggactccattccactccattctattccattccactccattctattccaccacactccattccattccactccactccattcaaatccaaagtactccactccattccattccactccattcctc

SEQ ID NO: 669 - DNA, 179 bp, Protomyxzoa rheumatica
ttagattccattcctatcgattccacaccattccattcctttgccttccattctattccattccattccattccatttgattacattccgttcaataccattcctttctattcaattacatagcaatccattacattccattcctttctaatccagtcgattccattcgattgcattcc

SEQ ID NO: 670 - DNA, 169 bp, Protomyxzoa rheumatica
gtcagtgagatcatgagatcatgaatgagtaaatgagatcgtgagatcgtgagtgagtctatgagtgagtgagatcatgagggagtgagtgagggagtctgtgagatcgtgagtctgtgagtgagatcatgagtgactgagtctgtgagatcacgagtgaatctgtgag

SEQ ID NO: 671 - DNA, 124 bp, Protomyxzoa rheumatica
ttccattccattccattccattccattccattgcattacacactaggccattccactgcattccattccactcctctccattccacttcactctacaccattccactccactccagttcactgc

SEQ ID NO: 672 - DNA, 390 bp, Protomyxzoa rheumatica
attccattccattccattcgagcccattccttaccattacattccattcgactcgagtacattcaattccattccattctatttaaaacctttacactccattccattcgattcaattccattccacttgagtccattccaatccattccactcgtgtccattccattcgaatccattccattccatttcatttgaatccattcccttctattccattctactccattcaagtccattccattccattctattctagtccattccattccattcgagcccattccattccattatattccattcgactctattccattccattcctcttgagtccattccattccattccattcgagcccattccaatccattacatttcattcaagtcc

SEQ ID NO: 673 - DNA, 125 bp, Protomyxzoa rheumatica
gcattccactcccctcccctcctttccattctattccatgctttctgttacactccattccattccattctattacactccactccattacattccattccactccattcttctccattccactg

SEQ ID NO: 674 - DNA, 149 bp, Protomyxzoa rheumatica
aaggaatggaatggaatggactcaaatggaatggaatggattcgaatggaatgaaatgtaatcgaatggccttgaatggaatggaatggatttgactcgaatggaattgaatggaatggacctgaatgtaatggatcgaaaagttgtcg

SEQ ID NO: 675 - DNA, 156 bp, Protomyxzoa rheumatica
gttatggaatggaatggaatggagttgagtggagtgaagtggggtggagtggaatggagtgaagtggagtagaaaggtgcagaatggaatggagtggtatggggcagaggggagggaaggggagttgagtggagtggaatggaatggagtggaggg

SEQ ID NO: 676 - DNA, 138 bp, Protomyxzoa rheumatica
atacacacaccatacaccatacacacacatacataccacacatattacacaccgcacaaatacatgcacactacacatacatatgccacacaatacactctatacacactgcacacacacatgcacacaaacatcaca

SEQ ID NO: 677 - DNA, 259 bp, Protomyxzoa rheumatica
aatggaatggagtggagtggaatggagtggaggggagacaaacggaatggaatggaatggaggggaggggagtgaagtggaatgtaaaccagtgggatgtagtggagtgaagtggattggaatggaatatagtggaattgaatggaatggagtggaatgcaatttaccgaaatggaaaggaacggaatggagtaaagttgagtggaatggaattgagtggagtggtatggaatggaatggaatggaatggagtgtagtg

SEQ ID NO: 678 - DNA, 175 bp, Protomyxzoa rheumatica
actccactctattgcattacactccgttccatttcactgcactccggtccactccacagaactgcactccactccactccactgagatccatttctttcctttccgttccattccgttccattccactccattccattccactccactccagtccacccctctccatttcactcc

SEQ ID NO: 679 - DNA, 125 bp, Protomyxzoa rheumatica
cacaccctactacacaccacacaccctactagacaccacacacacaacctactacatgccacaccacaaagacacacaccacactacacataccacacatggcacacacagacaccacacacacc

SEQ ID NO: 680 - DNA, 147 bp, Protomyxzoa rheumatica
agagcctagacaaggattacatgacctaggtggtcagtacagagatacatcccaatgcccctgtagacagagccttgacaggtagtatatcacctgagtgataatttcagggatatgtcacaaagaaccctatagacagatcctaga

SEQ ID NO: 681 - DNA, 128 bp, Protomyxzoa rheumatica
attccattcgattccattccattcgattccataacattctattgtattcattcgattcccttctatttgaataaattccattcaataccattcttttgagcccattgtatttgagtccattccattcg

SEQ ID NO: 682 - DNA, 202 bp, Protomyxzoa rheumatica
cctggaatgaaattcaatgcaatggagtgtattagtatggaatggaatggaatggacctgaatggaatgctttggaatgcagtgggatggattagacgagaatggaaaggaacgggatggaatggaatggagaagaaaagaatggaatggaatctaatggaatgcaattgaatgcaatggactcgaccggaatgtattggaa

SEQ ID NO: 683 - DNA, 172 bp, Protomyxzoa rheumatica
tggaatgcaatggaatgggtggagtggagtggaatggaatgaaatgggaaagaatagaagtgaacggaggggagtggagtggaacgcaatggaatgcaatggaatggatagcagtttagtggcgtggagtggattggaatgaaatggagttgagtggactggagtggagtgg

SEQ ID NO: 684 - DNA, 126 bp, Protomyxzoa rheumatica
ccatttgattctattcgattgtgattccattcgattccatttgatgaaaattccttttgattccatttgatgatgattcccttcgattctattcgaggccgattctattcggttccattcgataat

SEQ ID NO: 685 - DNA, 191 bp, Protomyxzoa rheumatica
tggtgtggagtggagtggagaggagtggaatagaatgtagtcgaatggaatggagtggagtggaatggattgaccagaaaggaatgcagtggagtggaatggaatggagtggcaaggaatggatggcaatggagtggaaagaaatgaagtggtgtggattggaatggaatggaatggaatggaatggaatg

SEQ ID NO: 686 - DNA, 136 bp, Protomyxzoa rheumatica
cagaagtctctacagaggttccaagtctcatgcttgttcatgtatttaatgaggtgtaggatggcctcaggggaccccttggaatgtgggaaactggagttccttttttaaaaacacatccctttaggggtactac

SEQ ID NO: 687 - DNA, 231 bp, Protomyxzoa rheumatica
acaggtacactcaccctcacgcacatgtatacatacttacacacaagcacactcacacacttatacacacagccacactcacacccctctacatacacacaggcatactcgcccttacacacacttatacatacacacaggcccactctctcacacacactcatgtatacacacaggcacaccctcacagacatactcataggcccactcacacacactcatatatacgca

SEQ ID NO: 688 - DNA, 293 bp, Protomyxzoa rheumatica
gaatggaaaggagtggagtggaatggaatggagtggagtgcaataaaatggaatagagtggaaaaatatgaatggagtggaatggagtggattgtagtggagtggattgtggtggagttgaatggaaatgaatagactggagtactatggaatgaagtgcaatggaagggaatgaaatggagtggagtggaatgctatggaatggaatggaatgggttggaatggaatgaaatgtagtgcattggaatggagtggagtggaatggaatggagtggagaggaaagaaatggaat

SEQ ID NO: 689 - DNA, 338 bp, Protomyxzoa rheumatica
atggaatgggatggaatggaatggaatgcaatcaaaaggaatataatcgaaaggaatggaatcaaatggcatcaaatgaaatcaaatggaatgtggtgaagtggagtggagtggaatggaatggaaagaaatggagtggaatgtaaatgaatggagtgtagtggactggattggaatggagtggaatggaatggaatggaatgggaagaaatggaattgaacggagtggagtggagtggaatggactggaatggaatagaatgaactcgaatggaatgtactcgaaaggtatggaatcaaatgtaatggaatcgaatggaatggtattgaatggaatg

SEQ ID NO: 690 - DNA, 260 bp, Protomyxzoa rheumatica
cgaccctgtcggcgcgcaaggtgaacgagtacaaataattcgaacacgccaagcattgccatcgccatggcaattagtctcagcactactaaactacctttgcgcgagtattttactttcctcaatcattgatctatttcccaggcattgggagattccgtcatgattgaatttttgtccgcctcagccggcgtgttgcaaacacgacatcaaagccacgtaacgggtacactggatcttccctgccgtatcagggtctt

SEQ ID NO: 691 - DNA, 126 bp, Protomyxzoa rheumatica
aatggaatgaaatggaatggagtggaatggaatggaaaggagtggagtcgaatggagtaaagtggaatcgaatggagtggaatggaaaggaacggaacagaatggaaggcaatagaacggagtgga

SEQ ID NO: 692 - DNA, 81 bp, Protomyxzoa rheumatica
aaggaacggaacagaatggaaggcaatagaacggagtggagtggagtgaattgaattggagttttctggaggggataggag

SEQ ID NO: 693 - DNA, 108 bp, Protomyxzoa rheumatica
tggagtgaattgaattggagttttctggaggggataggagagcactggaatggaatggaatggaatgaagtggagtggagtggaatgaagtggagtggaatggagtgg

SEQ ID NO: 694 - DNA, 331 bp, Protomyxzoa rheumatica
tccattctcctccactccactccaggctacaccactccactctgttccattttactccattccattcccttccaccccactccattcaattccaatccattccattgattccacgccactgcattccattctacttcacttcaacccattccattctactccattccattcaattgcattccattccattccactccactccactaaattacactccgctccattcaagtccacttcattccattactttcctctccattccattccactccacccgactccactgtactccacaatactaaatttcattcaattccactacactctttca

SEQ ID NO: 695 - DNA, 175 bp, Protomyxzoa rheumatica
aatggaaaggaatgaaatggaatggaacggaatcagccagtgtggcatggaacggaatggaatgggatggaatgtaacggaataaatccgagaggaatggtatgcaatggaatggaatggaatggaaaggaatcaaccagataggaatggaatggaatggaatggaaatgaatgg

SEQ ID NO: 696 - DNA, 360 bp, Protomyxzoa rheumatica
ccagtcctctaaacttcgctccattccactccattcctatccactccattccactcctttccaatttaatcaacttcactcaaatccattccattacacttgactccactccactccacttcactcctctccattcaactttgctccactccattctattccactccactccactctattccattccattccactccacttctctacacttcactccactctactccactccattaccttccactccactccagtccactccatgccattccatttctttccattccactacacttaattctattcctttcctctcctctccattttgttccactccattccattccactccattccatt

SEQ ID NO: 697 - DNA, 251 bp, Protomyxzoa rheumatica
tgttagttgcttcaccgtatttgttatacaatcagtttgtttttggagatattctccaaagttctggaaagacatttctgttgttccagcagacatatcagtccttccacggtactaaccatgcgatcatggttcggcggattgctgcgctgaaggaatacctctgggagaatttgggcgcgcgcctttacgttcatcccatcattttctatgcgacgtggttcgccacaggattgctgctggttcgtcgt

SEQ ID NO: 698 - DNA, 337 bp, Protomyxzoa rheumatica
tggaatggactggagtggagtggaatggaatggagtggagtcgaatggaatggagtggagtggaatggactggagtggaatggaatggaatggagtgaacggaatggagtggagtgaagtggagtggaatggattggaatggaatggaatggaatggaattaagtggagtggagcagagtggagtggaaaggaatggaatggagtggaatggagtgcagtgaagtggagagaagtgcaatgaagtggaatggaattggatgtaatggaatgtagtgcagtgtagtggagttaagtggaacgaaatggaatggaacgggacggaacggaatggaatgg

SEQ ID NO: 699 - DNA, 168 bp, Protomyxzoa rheumatica
ccataaggaattgtgcagttctgcggggctggtaacaagggatactgctactctcctaggcttgaaagggataaagagaagatcccatcaccagaagagaacttggagaccgagactgagcagagaaggctcttggacaggagtagtgacttttagtcaagagatgaa

SEQ ID NO: 700 - DNA, 279 bp, Protomyxzoa rheumatica
cgaatggaatggaatcggatagaatggaattgaatgcaatggattggaatgcaatggaatggaatggaatgaaatcgaattaaattgaatggattcaaatggaattgaatcaaatgcaatggaatggaatagaatgaagaggaatagaatagaatggaataaaatggaatggacgcaaatggaatgactcgaatggaatgggatcaaatggaatgaaattgaatggaatggaattgaatgatattgaatggaatgcggtgaagcagattggattggagt

SEQ ID NO: 701 - DNA, 126 bp, Protomyxzoa rheumatica
cgggtcccttccatttgagtccattccactcgagtccattctgttccattcctctctactccactcctttccatttctctccattccactccattgcattccaatccattccattccattccattc

SEQ ID NO: 702 - DNA, 296 bp, Protomyxzoa rheumatica
cttgcagaaatgtcaggatcgtaacttctactgcttctagttcactccttctacctccaaccatgcttgatggttggtcaattttggagaaggaactgaagctgcctcaacaagccctctctgaattccttgaagttgcctctgtgcaggacacgtgcattctcctcttccaccaatcactgagctgcccctgaataggaggccagagtggttcagctgtgcctgtgactggagagggatgtttaactgtgtcaggcctggaatattagcaaggattaagggccaggttgtggaca

SEQ ID NO: 703 - DNA, 153 bp, Protomyxzoa rheumatica
cattccattcctttccattccattcgagtccaatccattccatccaattccattgcactcgagttttttccattccattgcaatgcatttcaatccattccattgctttcgtgtccattcccttccattccattccattcctttccattccat

SEQ ID NO: 704 - DNA, 137 bp, Protomyxzoa rheumatica
tgcgcaaccgccaagaccgtgccagaccccatcattggatctaacacccgcatgctggtctttgctttcgctagaatatcgagagcgatgcctggggccattcgtgctggaaatgggtggacagcatggcgacccaa

SEQ ID NO: 705 - DNA, 148 bp, Protomyxzoa rheumatica
catggacctgagcaggggcagagcatcctgtgtatcacgcaaaattgtccctggcagtccatctcaagtgtccttctcagggggcaacttccagggacaggggtgctgcctccttgtctctgattttatctccccggcagttcccagg

SEQ ID NO: 706 - DNA, 123 bp, Protomyxzoa rheumatica
cattcctttccgttccattcgggtaaattcaatgccattccactcgagtccattccactccattcaagtcaattctattccattcaaaccctttccattagtgtgcattctattccattccat

SEQ ID NO: 707 - DNA, 190 bp, Protomyxzoa rheumatica
tgcattcaattccattccatttcatttaactctagtcgaccccattccattccattccattttattccattcccttccattctattccattctagtctattctattctattacattacattcgtttcgagtccattaaattccataccattccattcctttccattccactccattccattccgttactt

SEQ ID NO: 708 - DNA, 503 bp, Protomyxzoa rheumatica
agagggttccattccagtctattcctttcgagtccattccattccagtccagccctttccattccattcaattcccatccatttgattccattccattcatttccattccttgtaattccattccattggattccattcctttcgattcctttccattcgactccattcctttcgaggccattccattcagtccatttcattcgagtacattccattccattccagtcaattcagttgtgtcaatttcattccataccactccaatcttttccgttccattcaattccatttgatatcattccattcgattccattccattcaagaccgttccattccagttcagtccattcatgtccattccattctattccattccatcagattccattccattgcaatccattccattcgagtttattccatttgagttaattccattcccgttcattgcgttccagtccattccatgtgattccattccatttgattctattccattcc

SEQ ID NO: 709 - DNA, 128 bp, Protomyxzoa rheumatica
ctctatatgtagctttagatatagatatcagatatattcagatttcgtgttttttcttgaataagctttaataaagctagatactacaaacaaaaaactcagaaaaagtatactcacaagaatattca

SEQ ID NO: 710 - DNA, 216 bp, Protomyxzoa rheumatica
cactccactcaatttcattccactccactccattgcattcatctccacttcactcaattccactttattccactacaattcattcaatttctctcatttccactccactctactgcattccactccactactttccattcttctccactccattccattccattccaccccataaaattacattccactcctttccattcgtctccattcaattcc

SEQ ID NO: 711 - DNA, 136 bp, Protomyxzoa rheumatica
ggccactctgtgtctgtcatggctaaaagctgtacttagagaaaagcacacagatggtgggtgtgaacccagttgcacccctcatttgctcttcaccttcatccagtcgctttcttctgagtttctcaatgggaaa

SEQ ID NO: 712 - DNA, 169 bp, Protomyxzoa rheumatica
ttccattccattccattccattccactgcattccattccactccacaccactgtatccattccactctattccattccactccactccactccatttcactccatagcactccattccactgcactcccctccactcctctccactccactccactccattccattcca

SEQ ID NO: 713 - DNA, 438 bp, Protomyxzoa rheumatica
attccactccaattccttccattctactccacttcattccagtgcactgcattccattccattccactcccctcccctccattccagtgtactccacttcactccaataaattccaatcgactcaattccactgcactccactgtactccattccttgtattccactacagtccacttctttcctctcaactccactcaattccactccactccactccactccattccaaaccactccattccactccactccattccactcccttgaaatccatccattccattgcactccattttattccaatccacttcattccattctactccacttcattccattccactccattccactccactgcattccattccactccactccactccattcagctccactccattctattccactccactccactccattccattcc

SEQ ID NO: 714 - DNA, 198 bp, Protomyxzoa rheumatica
gaatagaatccaattgaatggaatcgaatgccatcaaatgaaatcaaaaggaacacaatgaagtggagaggagtggattggaaaggagtggaatggaaagggatggaatggaattgaatgtagtggagtggagtggagtggaatcgagtggaatggaatagaatgagaaggaatggaattgaatggagtggagtggag

SEQ ID NO: 715 - DNA, 132 bp, Protomyxzoa rheumatica
atgtaatgtgatggaatggagtgtagtgtggtggagtgtagtagaaaggagtggaatggaatggaatggagggtagtggaattgaatggaatgaagtgtagtcgagtggagtggagtagagtggaatggaat

SEQ ID NO: 716 - DNA, 177 bp, Protomyxzoa rheumatica
gatatatagtgcgtactatatatatactcaactacatactatatatagtatatatatatatacatactatatacttatatatacttaaatacatactatatagagtatatatatagtacgtactatgtaagtatatatatacttaatatatatagtatgtaatatttggtttatatt

SEQ ID NO: 717 - DNA, 140 bp, Protomyxzoa rheumatica
aattacgttgcaatccatgacattccagtcctttgcattccagtccattccattccgatccattccattcgattccatacctttcaattccattccccactattgcattcattcgattccattctattcgaataaattcg

SEQ ID NO: 718 - DNA, 144 bp, Protomyxzoa rheumatica
tcgattccattccattccattccattccgatggattccattccattcaattccattctgttcaattccattgcattcccttgcattacattccttttgattccattcgattcgattctgttctattcgattccattccatttga

SEQ ID NO: 719 - DNA, 245 bp, Protomyxzoa rheumatica
tgctgtattcaagaaattcgcttcaaacacaatgtcatatgcaggatgaaacttaaaggaaaaagataaaccatgttaacattaaaaaaataaattgagtgactatattaatatcagataaaacaggtttcaaagcaaagaaaattatcagttataaaatgatatgttataatgataaaataatccattaaaatgtttctattgactgaattatgttcatcaaaatatatatcttgaagccctaa

SEQ ID NO: 720 - DNA, 268 bp, Protomyxzoa rheumatica
aaccattagcttcgcagtcgtactcgtcgcggtgatttatctttaccgatcgggcctctacttctgcaagaactgcgagatcgatagccttcagctcacaatcgccttcatcctcctcggactcaccaccatttctctatttgcaaaaatgatgacgatcgacgtggcccacatttccctctatatgctatcaattttctcagttctaagtgtcgtatggcttttccagatgaacgcttcacgcgtagcgcacgctccagcccatgtg

SEQ ID NO: 721 - DNA, 144 bp, Protomyxzoa rheumatica
tgtagtagcttcatgtgtgtggtgtgggggtgtgtgcacgtgtgcacatactgtgtggtgtgtgtgatgtctgtggggggtatgtttgcacatggtgtgtacacagtgtgtgtggtgtcagaggtgtgcatgtgtgcacatggt

SEQ ID NO: 722 - DNA, 125 bp, Protomyxzoa rheumatica
taatcatcactatcaccatcattatcaccacaatcatcatcatcaccacactatcatcaccatcatcaccaccaccaccatcattttcatcatcatcaccatcatcatcatcttcaccatcatca

SEQ ID NO: 723 - DNA, 128 bp, Protomyxzoa rheumatica
ccattcctttatttagaatggaactcactttgtcactcagaatggattgcagtgttcttatcttagctcacatttcaatcaccattcgatacaattccattccattgcataacataccattgaattcc

SEQ ID NO: 724 - DNA, 149 bp, Protomyxzoa rheumatica
ccccgaatggaacagactcgtatgaaatggaatcgaatggaatggaatcaaatggaattgatttgagtgaaatggaatcaaatggaatggcaacgaatggcatcgaatggatcaactgaaaagaggagttgcatggaatggcttcgaat

SEQ ID NO: 725 - DNA, 164 bp, Protomyxzoa rheumatica
atttttatggtatagaagctaaggtaatgtaataaattgcaatcatgattcttgcccattttgaaaaaataaaatggcattgatggttaaaaaatataaacgttgaatttcaaaggacagttaacacaaattaaactagttcaacctaaccattttgactctgg

SEQ ID NO: 726 - DNA, 224 bp, Protomyxzoa rheumatica
caaaggaatggaatcactgaatggaatggaatggaatggaatgcaatggaaaggaattgaatgcaaaggaatgaagtggaacggaatagaatggaatggaatggaatagaatggaatagtatcaaatggaatggaagggcaaggaatcaaaaggaatggaatgcaatcgattgaagtataatggaatagaatggaatggaatggaatcgaatggaatggaaggg

SEQ ID NO: 727 - DNA, 195 bp, Protomyxzoa rheumatica
ttcaattccactccattccgttccaatccacttcactcctttccattccactgcattccattccactccatttcattccgcaacacactattccattacattcctttccaatccactctattccactccatttcatttcactccactctcctcatttccattctattccactccattcccctccattcccttcta

SEQ ID NO: 728 - DNA, 166 bp, Protomyxzoa rheumatica
cataccattccattccattccattccattccattccattggtgtccatagctttccattccattcgagtccattccattccattcgagtccattccaatacattacgttcgagtccattccattcaattccattcctttctattccattccattacattcggattg

SEQ ID NO: 729 - DNA, 333 bp, Protomyxzoa rheumatica
attgaatggaatggaatcgacttgagtggatgcaatggaatggagtggaatggaaagaaatgcaatgtagtggaatggacccaaatgaaatagaatggaacggacccaaatggaatggaatggaatggtatacacacgaatggaatgaaatggaatggaatcaaatggaatagaagggaatggaaaagaattgaatgtaaaggagttgaatggaatggactcgaatggaatggaatggaatcaaacagactcgagtgaaatggaatggaatggaagggactggaatgaagttgaatgcagtggagcgtattagtatggaacggaatggaatgg

SEQ ID NO: 730 - DNA, 158 bp, Protomyxzoa rheumatica
aaaggaatggaacggggaggaatggagtggagtggagtggagtggaatggaatgaggggaatggagtgaaatatagtggagtgaaatatattggagtgaaatggaatggagtggagtggaatggaatgtaatggattggaaagcaatggaatggaatg

SEQ ID NO: 731 - DNA, 148 bp, Protomyxzoa rheumatica
ggaatggaatggaatggaatggaatccaatggctaggaatcgaatggcatcgcatggaatcgaatggagtgcattgaagtggagtgaagtggagtggagtggagttgaagagagtggaatggaatgttgtggaatggaatagaatgga

SEQ ID NO: 732 - DNA, 125 bp, Protomyxzoa rheumatica
agccttgcttgccactgttcataaccagtatctgtggttcattcgttctgtgggacatccagcaccttcagccgagcattgccccagaggggacacgaggcagttacaatggctgggccctggca

SEQ ID NO: 733 - DNA, 201 bp, Protomyxzoa rheumatica
agtggattggaatggaatgtagtggaatggaaatgaaagaagttgaatggaatggagtggaatgaaatggaatttaatggagggggaggagaggaatggaattgagtggagtagaatagaatggaagggaatggcctggagtggagtggcgtggcgtcaagtggatggcaatgaatggaatggaatggagtggaatggagt

SEQ ID NO: 734 - DNA, 202 bp, Protomyxzoa rheumatica
tggaatggactcgagaggtgtggaatggaatgtatgcaaatggaatggtctgcaatggaatggactggaatggaatgcaacctaaaggaatggtatcaaatggaattgaatcaaataaagtggaatggaatggaattgaaaggaatggatttgaaaggaatggattataatggaacagtctcgaatggaatggaatcaaagt

SEQ ID NO: 735 - DNA, 356 bp, Protomyxzoa rheumatica
gaaatggagtggaatggaatgtgttggattggaattgaatgtataagagtggagtggactggaatcgagtgtaatggaatgcaatgggaagtaatagaattgaacggattggagtagagtggaatggaatggagtggagaggagtggagtggagaaaattggactggagtggaatgcaaatgaatggaatggaatggaatggacagatgtgcaatggtgaggagtggagtcgattggaatggagtggaactgggaggaggggagtggagtggaatggagaggagtggaatggaatggagaggaatggagtggagtggatttgagtggagtggaatggagtggaatggaatggaatg

SEQ ID NO: 736 - DNA, 186 bp, Protomyxzoa rheumatica
cattccactccactccattccactccactccactccattttactccactccattccaactcactcctctccatttcacaccattccactcccttccacgccactcctctccacgccactttgttccattccaatcaattccattccactccactccattccactcaactccatttcactacactct

SEQ ID NO: 737 - DNA, 634 bp, Protomyxzoa rheumatica
gttatcacaaccaattacgacacttgcatcgaacagtccataatacacaagcatcttgttattgaagagcgccacgttgctagcagaggaagcggaacgaatatcttcaaagtgcatggttgtgttaccaatccgagttccatcatatatcggctccaagatgaaggagtgcttccggagtggaagcgtagatatctggcttctcttgttcaggaccgcgatattgttctcattggttactcaggtcgtgacttcgacatttgtcccatcctgttgcgatgcaattacaggagtcttcattggctgttccctggggccgacctccagcagcagctaaaatgggagagtcagaacgcccgacatgtctttcataaccccgaagagtttccgcgggcccgagctattattggtggttttgacgcgttcttcgatgccggcaggtcgtttcagctctcacatttgacaggggatcttgtcgagcaactgcatgagaaggagggacaatatcctgaggctttcgcgcattggcgtgcatcagtgtttaacgcaatctcatgtcgcatcggtacagatgctaatctacgaaatctaagtagcgcagcgtgcgatgagcctcgctttgttcggctctcct

SEQ ID NO: 738 - DNA, 248 bp, Protomyxzoa rheumatica
cacgagcgaaggcgagatcttcgtcaaacttgatgcggtccattcgcagcgaagagatagcattgcggagtttcttcaacccatctccaacttgaccaaaatacccagccgtatagaatcgaccgacttcaataacaaatgtttcaagccaagcgtcaggctggttgctccggtcgatgaggttacgcaaccttctcaccttcgagatggaatccctatacttgccggcccgctccaatgagtcggag

SEQ ID NO: 739 - DNA, 161 bp, Protomyxzoa rheumatica
agaatggactcaaatagaatgaactgaaatagaattaactggaaacgaatgtaatccaatggaaaggactcaaatggattgtactcgaatggattggaatcgaatggaatggaatcaaatggaatggaattgaatggaatttaattgaagggaatgtattc

SEQ ID NO: 740 - DNA, 162 bp, Protomyxzoa rheumatica
tgcattccattccattcctgtccactccattccattccattcccctcggtttgattccattccattccattccaatgcataccattccaatacataacattcctttccattccattccattcatggaactgaatggaatggaatggaatggaatggaatgga

SEQ ID NO: 741 - DNA, 131 bp, Protomyxzoa rheumatica
agaatgtagtgaaattgtgtggaatgcagcggagtggaatggaatggaatggagagcagtggaatgtagtggagtggaggagaatagagtggaattgagtggagtggaagagaatggaatggaatggaatg

SEQ ID NO: 742 - DNA, 225 bp, Protomyxzoa rheumatica
cactccattccattccactccattcctttccattccactctattcccttccattccactccatttcactccactccaatccagtccactccatcccattccactccttttgattcaaatccactccactcccttccatgtcactgcactccattccattccagtccactatactccacttcactccactccattccactccactcaactccattcgactccattc

SEQ ID NO: 743 - DNA, 170 bp, Protomyxzoa rheumatica
atggaatgatgtggaatggagtggaatggttaggaatggagtggacttgaatgcaacggagttgaatggaatggaatgcaaagcagtggagtggaattgagagaagtggaattgagtggagcagagtggtgcagagaggggtggagtggaatggagagagttgaatggaa

SEQ ID NO: 744 - DNA, 442 bp, Protomyxzoa rheumatica
ggaatggaatggaattcaatggaatggaatggaatggaactcaatggaatagtatggaatggagaggaagggagttcagtggaaaggaatggagtggaatgagtggaggggaatggaacggaatggaatgtagtgcagtggagtggaatggtgtggagtggagaggagttgaatggaagggaatggagaggagtggagtggagtggagaggtggggagtggaatggaaaggaatgcagtggaatgtagaggtatggagtaaattggaatggaatgtagtggaatgcatagaaaggagtggaatgaagtggtgtggaatagaatgaaatgcaaagaaatggaatggaatggagggggtagactggaatggaataaagtgaagtggaagttaatggaatggaatggagtggaatggagaggagaggagtcaagtggaatggaat

SEQ ID NO: 745 - DNA, 181 bp, Protomyxzoa rheumatica
attccattccattccattccattaaattccattccattcctttctattcattttgtgtccattgaattcaactgcattcaattcgagtctattccatttcattccctgccattgcattcccttccattacatttgagtcctttccattccattccattccattcgagtccatttcattcca

SEQ ID NO: 746 - DNA, 246 bp, Protomyxzoa rheumatica
aatggaatggaatggaatggaatggaagggaatggaatggaatggaatggaacggaattaaccggaatagaatgcaatggaatggaatggaatggaatggaatggaatggaaaagaatgcaatagaacagaagggaatcaactcgagtgaatggaaaagaatggaatgtatttgaatggaatggaattgaatggaatgcaatagaattgaatggaatcaaatcgagtggaatggaatggaatggaa

SEQ ID NO: 747 - DNA, 141 bp, Protomyxzoa rheumatica
aatgacgcgaatcctccgccggaggctagggcaaagcacgaggctataacccgggtctttgagaggtgtggttttacagtcagtcaatgcggtgactggcatggtcagctgatctgggatgcggaacaagttgcctgcttg

SEQ ID NO: 748 - DNA, 195 bp, Protomyxzoa rheumatica
atggaatggaatcgaatggaatgttattgaatgacttctaatggaatccaatgtaatgtgatgaagtggagtgtagtggaatggagtgggattgaagggggtggaatgaaattgaatgcagtggagtggagtggccagcaatagcgcggaatggaatggaatgggaaggaatggaattgaatggagtggagtgga

SEQ ID NO: 749 - DNA, 221 bp, Protomyxzoa rheumatica
gtggaatggagtggagtgcaatggaatggaatgcaatggaatggaatcgaatggaatggaatggggtggagtgaaattgaatggagaggaatggaaggagtggaatggaatgtagtgtaaaggtatgtaatgtaacagtggagtggaatggaatggaatggaatggaatggagtgttgtgcaatggaatggaatggagtggaatggaatagaatggaatgg

SEQ ID NO: 750 - DNA, 284 bp, Protomyxzoa rheumatica
ggccaaatatttgtcccctttattctcatctattacctgtttattcaaatctataagagcagcttcttcgaaaaactactgaccagaaaattgctattaactcaacaacctgtggcagttatcaaaacacttctcacttcaaaggtgaacagtaaaagcaattacctatgtggagttttaaaaaggggttttaaaaacatccctcacttatgtgtgaaggcagaaatatacattgacatttcatgcctagttgtctagttgctgtcttcctatgtttgctttct

SEQ ID NO: 751 - DNA, 261 bp, Protomyxzoa rheumatica
ttccattccattccattcttttccaccccattccattcctctccattcccttccattcctttccggtccattcccttccactcctatatactccaatcgactgaattccagtctattccattccattccattttattgcaatccattccattccattcaacttgacccaacttcaatttcattcaacttgacggaactccacttcaatccgttccaatcaattccattctatataatcccattccattctattccactcct

SEQ ID NO: 752 - DNA, 151 bp, Protomyxzoa rheumatica
attataaaagaatatactaggaagggtataagaatgtgttttaagaggaagggcagaacacatccaagagagcagtcatgtaggagggggtatgtgagaagtaaaatagatgattaatgttgtgttctcatgagatttggctttctctctt

SEQ ID NO: 753 - DNA, 159 bp, Protomyxzoa rheumatica
agctttttaaaacctatgtcttggaagtaaaaacatccattttatttgctttttattgatgagaactcttgacaatgccatgatgtaaagcgaactgagaaattaagttactttgctggacaaaaattttccattgacaattcccttagaactatgaat

SEQ ID NO: 754 - DNA, 229 bp, Protomyxzoa rheumatica
aatggaatggaatggaatgaaacagatgactcgaatggtatggactcgaaaggaacggaatcaaatttattggaattgaatgaaatggaattgaatggaacggaatctaacggaatggaatagaatggagtggaatcgaatggatttgaattgaatggcatcgaatggtatccaatggaatgcggtccacttgattgcaggggagtgggatggagtgcaatggaatggg

SEQ ID NO: 755 - DNA, 214 bp, Protomyxzoa rheumatica
tccattcgattccattcaatgatgattccattagagtccattcgatgattccattcagttccatttgatgatgattccattttattccattcaaggattccatttgattccattcgttgactcttcctttgattccattccatgatggttccattcaattccatatgatgatgattccatttgattccattagatgatgattccattccactcc

SEQ ID NO: 756 - DNA, 339 bp, Protomyxzoa rheumatica
aaggaagtggagatggatggaatggagtatagtggagtggagtggagtggaatggaatggaatggactccaaaggactggagtcaaatgaaatgtaattgaaagcaatggaatggaacggaatggaacggactccaaaggactggagtcgaacggaatggaattgaatgcaaaggaatggaatggaatggaatggaacggaatgcaattaaatgaaatggaaaggaacgcaatggaatggaatggagtggaatgcaatggaatcaaattgaatggaatggaatcgagtagaatgtaaatgaattgaatggaatggaatgaaatggaatggaatcgaatg

SEQ ID NO: 757 - DNA, 283 bp, Protomyxzoa rheumatica
gtggtgtgaaatgaaaaggaatggaatggaatggaatggattggaaaagaatggaatggaggggaatggaatggaatggaagggactggaatggcttcgagtggagtgtagtggaatggagtggaatagaatggaaaggagtggaatggaatcgaatgagtggaacggaatggaatgcaatggaatggaatggaatggaatgtagtggagcagagtggaatggaatggaatggaatatagagtagtggaatggaatggaatggaatgcaatggaatggaatgg

SEQ ID NO: 758 - DNA, 323 bp, Protomyxzoa rheumatica
ggaaagtaatggactggaatggaatggaatcgaatggaatggaaacaaaaggaatggaatcaaatggaatggaatccaatggaatggactctaatggaatggattggaatggaacggtcttgaaaggaatggaattgaatggaatgaaatggaatagtattaaaggcaatggaatgaaatggaatcgaatggaaaggaaaggaatggagtgggatggaatggaaacgaattgaatggaatggaatgacaaggaatggaatcaaagggaatggaatcaaatgaaatagaatctaatggaatggaatggaattgattcaaatgga

SEQ ID NO: 759 - DNA, 272 bp, Protomyxzoa rheumatica
aatatgatgccattctgttcctttacattccatttcattccagtcgattccattctattcaattccattccattcgattcaattccttttgattccattccagtgtattccattcaatttgattcccttccactcgattccacaccatttgggtgcttttcattcgagtccattccattcctctccattccctcccagtccattccagtccagtccattttactcgagtccattgcattccattccttcatattccattccactatactcca

SEQ ID NO: 760 - DNA, 183 bp, Protomyxzoa rheumatica
tgcaatggaatggaatgaaatcgaatggaatgcaatcaaaaggaacggagtcgaatggaatgaactggaatggaatggtctcgaaaggaatggactagaattgaattgactggaatggactggaatcgaatggaatggagtcgaatggaatggaatcgaatggaatggaatcaaatggaatgg

SEQ ID NO: 761 - DNA, 144 bp, Protomyxzoa rheumatica
caaatgcaaattaatggaatggactagaactgaatataatgtaaccaaattaaatggaatggaatggtgatgaacggaacagaatggaatggaatgggaaggaatttacacgaatttaacggaacggaatggaacggaatcgaa

SEQ ID NO: 762 - DNA, 139 bp, Protomyxzoa rheumatica
aggtaggagaaagaaccaaattcgaccaatggatagtcgatgaggcagtagagaaaatccagttcatatgcgaaagcatgaagaaggcgcaagaccaacaaaaaaagtacgcagatcgaaagatacgagaagtggagtt

SEQ ID NO: 763 - DNA, 166 bp, Protomyxzoa rheumatica
agagaccttcacaaaggaagatatccaaatgggcaataagcacatggaaaggtgtcaacatcatcagtcttctgggaaatgcgaagtttctctgatttggtgttttcatttttccatcataggttagttttacctgctctagattttcctatataaaaatagaatc

SEQ ID NO: 764 - DNA, 122 bp, Protomyxzoa rheumatica
ttaaactcggtggataaagtatacgccacataagacacagacaaaacaaggcagtgatataaatcacatcactagcgaaacgatattgggctcacaaggcaaaaattcttaaagagagtaag

SEQ ID NO: 765 - DNA, 143 bp, Protomyxzoa rheumatica
gattcgaaagaacttagccatgttctcgaccaaatccattacagctaaagatattaccaagattttttccacttgttctatatctgagaccatcacatcttcactctcaattcccaacaattagatcgtagatcctttaggtt

SEQ ID NO: 766 - DNA, 182 bp, Protomyxzoa rheumatica
ggaatggaatggaatggactcgaagggaatggattcaaatggaatggaaacgaatggaatggcattgaatttaatggaatttaatggaatcgaaaggtatagaatggaatagagcataatcgaaagatatcaaatggaatgtaatggactcgaatggaatggcctggaatggaatggagtcg

SEQ ID NO: 767 - DNA, 277 bp, Protomyxzoa rheumatica
gaatggaatcgaatggaatggactggaatggtatggactcaaatggagtggactggaacaatatggaatggaacagattggaattgaatgaaatggaacgtaatggaatggaaaggaatggaatggactcgaatgtaatggagttgaatggaatgcaaccgaatggaatggaatcgaatggaatggcactgaatggaatagaaaggaatagaatggaatggagtgcaatgtaaagatatcgaatggaatggaatggaatggaatggaatggaatgga

SEQ ID NO: 768 - DNA, 197 bp, Protomyxzoa rheumatica
aatgcaatggactggagtggaaaggacactaatggaatggaaacgaatggaaataaatgaaatggaaaggaagagaatggaagggaattggatggaatcggatggaatggaatggagtccaatggaatagaatcgaatggaaaggcatcgaatggaagggaatggaatcaaatggaatggactcaaatggaatagaa

SEQ ID NO: 769 - DNA, 123 bp, Protomyxzoa rheumatica
ggaatggaatggaatggaatggagtggagtggaatgcaatgtattggaatggagtagaatagagtagattggaatggaatcgagtgcaaataatggagtggagtggaatggagtggagtggag

SEQ ID NO: 770 - DNA, 138 bp, Protomyxzoa rheumatica
accttctccactccactccattccactccattccattccattcaaatccactcaacactccattcaaatccattccattccactcccttaaattccactgcactcaattcctctctattccacttcaatctattaaat

SEQ ID NO: 771 - DNA, 143 bp, Protomyxzoa rheumatica
gagtggagtggaatggaatggagtggaatggactggattggatcggagtggaatgtaatggaataaagtggagtggaattgtatggagtttaacggacagaaaggaatggaatggagctgaggggagtggaatggagtggaat

SEQ ID NO: 772 - DNA, 132 bp, Protomyxzoa rheumatica
gtctagtttttatttcaagatatatcttttccaactaaatcctccaacagctccaaatgtccacaatcagatccttcaaaagtagtgtttcagtactgctgtatcaaaaaaagttaaactctgtgagttgaa

SEQ ID NO: 773 - DNA, 243 bp, Protomyxzoa rheumatica
attaccgcaaattgggccggcgttgaggatggtcttttcaatattttcgttgtagcactcaacggcactttcctcgtcaaagacttaagaccattacgtgcggtgtttttcactttcagcgcatacgaaggcaagatgcgcatggtcaacaacgcgatcaaagcacggtttgcccaagaccaagacgtgctcgatagttggaaaacattgaaaagcgcactcgatggttttgctgcactccga

SEQ ID NO: 774 - DNA, 173 bp, Protomyxzoa rheumatica
gaatggaatggagtcgaatggaatggaatggaatggagtggagtggaatggtaatgaatgcaataaaattgagtagagttgaatggagtgaagtggagtggaacggaatgaagtggaatagagtggagtgaaaaggaatggaatggatggaatggaatggaatggaatgaaat

SEQ ID NO: 775 - DNA, 176 bp, Protomyxzoa rheumatica
ccattccattccattctattccattcgtgtttattccattccattgcattccattccattccattccattcggatagtctccgtttcattaaattccattccctttctttccattccatttcattccatcccattccagttgattccattccattccattccattccattccattc

SEQ ID NO: 776 - DNA, 144 bp, Protomyxzoa rheumatica
gttgtgtgtgttttgagtatgtgagtatacatgggtgtgtgtgttgagtatatgcgtatctgagtgtatagtgtgtatatgtgactatacatgagtgtggtgtgttttgagcatgcaagtgttgtgtgtagtgagtgtacatga

SEQ ID NO: 777 - DNA, 126 bp, Protomyxzoa rheumatica
cattcctttccactccattccattccattccagtccattccattcaattcgaatccattccattctagtccattcatttcaaatacattccactcattccattaaattcaatttcattccattata

SEQ ID NO: 778 - DNA, 126 bp, Protomyxzoa rheumatica
tgggaggtgttacctgaatagaggaaagaggagtgatggtggaaatgttctgtatcttgatgcccatttatcaatactgattgaatggtacacttagatacatatttcttatatgtaaattacatc

SEQ ID NO: 779 - DNA, 176 bp, Protomyxzoa rheumatica
cattccattccattccattccattccattccattccacagcactctgatccactccactcagttccactccatttcactccactccattccgttccattccattctgttctggtacgttccattccgttccattaaactccattccattccattccactccactccatttcactcc

SEQ ID NO: 780 - DNA, 320 bp, Protomyxzoa rheumatica
caaagccttcgactaggatcggtaagatttgcgaaattccaaatcccacatccgtgatgtctagatcgaacgcatgcccctcatttctcacagatagtcgaaaaattatctgctctaactgtgcgacacttatgttaatcgagaatgcggccagccagttgttcactttgtctcttagctgcgggtcttcccgaagcgactcaacaagaagattgccttcgcttgctcctgcttcggccgtatctagaaaatagaaccgcttaggatgggccctcagaggaccgatgtgaccaattttcttttcggagaatagcgatccc

SEQ ID NO: 781 - DNA, 153 bp, Protomyxzoa rheumatica
cagctgaccgtttccgaattggcaatcgggcaccgaaccgatgatataatccgcgcccatttcgatggaggatcgttatcaaaactgtctagctcgttagtagaaaggaagatgttcgatggaattttacgcgcgcttgatccagtcgtaacg

SEQ ID NO: 782 - DNA, 132 bp, Protomyxzoa rheumatica
ggagttcagtagactatagtggaatggagtggaatggagtgaaattgtgttgagtggagtggaattgaatggcatggaatggaatggaacagaacagaacagaatggaacggaatggaaaagagtggagtgg

SEQ ID NO: 783 - DNA, 131 bp, Protomyxzoa rheumatica
gaaacgaatggaatggaaaggaatgaaatgaaatgtaaagttatagagtggaatggagttggatggaatggagggaactgaatggagtcgaatggaaaacaatcgagtggaatggcatcaaacggaatgga

SEQ ID NO: 784 - DNA, 140 bp, Protomyxzoa rheumatica
atttcgttcaactccgctccattccaattcactccactccaattcattccattccattgcattccatgcaattccattccactctactccaatctgtcccattccattcaattcctttccatttcactccaatccaaccc

SEQ ID NO: 785 - DNA, 123 bp, Protomyxzoa rheumatica
cctactgaatctaaagaaatttttaactctgtgatgaatccacacaacaaataccagtttcacagatagatattttcctagattttatctggagatacttggcttcaacccttaggcctcaat

SEQ ID NO: 786 - DNA, 164 bp, Protomyxzoa rheumatica
aatggaatgcagttgaatggcatcgaatggaatccaactgaatgcagtgaagcggagtggaatggtgtgaaaagcagtggaattgaattgggtggaatggaattgaatgaagtggaatggaggggaatggagtggagtgaaatggaatgggaaagaatggaatt

SEQ ID NO: 787 - DNA, 133 bp, Protomyxzoa rheumatica
ggaacggacgggagtggaatggatttgagtggtgtgaagtggaaatgaatggtatggaatggagcagaatgtagtggagtggagtggaatggaatagagtggacaaaagttgaatggaacagaaaggaatgga

SEQ ID NO: 788 - DNA, 173 bp, Protomyxzoa rheumatica
actcaactccactccactccactgcactcctcttcattccattttcttcccttcatttctgttccattccactccattccgttccagtccactccattccccaccactccatttcactccattctattccattccattccactccactctactccactccatgccactctatt

SEQ ID NO: 789 - DNA, 360 bp, Protomyxzoa rheumatica
gaagtgagtggagtggagtggaatggaatggaatggaatgcaatggtgtggagtggggtggtgtggagtggagtggactggaatggagtggaggggagtggagtggaggggagtggagtgaactggaatagagtggaagggaatagaatggaatggaatggaatggactgcaatgaagtcaagtggagtggtgtcgactggaagggaacggaggggagttgagtggaacgtagtgcagtggagtgcaatggggcggaatttagtggaatggaatggaatggaagggaagagaatggaacacaatgaaatggaattttatggaatggaatggagtgcagtggaaatggaatgaagtggagt

SEQ ID NO: 790 - DNA, 250 bp, Protomyxzoa rheumatica
atggaatgcgatggaatggaatggaatggaatggaatggacatgattggaatggaatataatggaatggaaccaaatggaactgaatcaaagaattgaagttaatgaaatcgaaagggatagaatggaatggaaaggaatgaaaagatatctaatggaaaggagtggaatggaatggagtcaaatggaacacaatacaatggaatgacatcgaagataatggaatggaatggaatggaatcgaatggaat

SEQ ID NO: 791 - DNA, 133 bp, Protomyxzoa rheumatica
aatagaattgaatggaatcagcatcgaacgatatcaaaaggaaacgtcatcgaatataatcgaatggaatcattgaatggaatcatcaaatggaatcatcatcaaatggagtcaaatggaatcatcaaatgga

SEQ ID NO: 792 - DNA, 185 bp, Protomyxzoa rheumatica
gaggttcgaatacggattgaactcggcagtgcgcgccgctctcgcggcggatgcatcgaagtttaggcaaatcctcgtaatactacgtagtccgtattgtggatgatgatcgcaaatcgtcggtcgcaaataaatattcgggcggtcgaaataaatgtcgcgtccggttcgcggagtgtcgtgcc

SEQ ID NO: 793 - DNA, 167 bp, Protomyxzoa rheumatica
atggaatggaaaggaatggaatggaaaggaattgaaaggagtggagtggagtagagtagagtggaatcgaatgaaatggaatggaatggagtgtaatttaacataaaggaggggagacaagtggcatggaatacagtggaatggcatggaatggagtggagtagaat

SEQ ID NO: 794 - DNA, 203 bp, Protomyxzoa rheumatica
agggagggtataacgatataaatatattcttcttccaaaaaagagtgaagggcaacaaatacaagaagaattatgttgaaatcaggcgttaattaaaaacataaaattcagatgtgtattcatgctgcattgaaattatttatatcgaaaatgataattgtagtaggagtagaataacaaagacatacacaagtgcaactcgg

SEQ ID NO: 795 - DNA, 222 bp, Protomyxzoa rheumatica
tggagtggagtggagtggaatggaatggagtggagtgcagcagaatataatgcagtggaatggaatagaatggagtggagtggagtggagtggaattgattggagtgcagtggaatggaatggaatgtaggggagtggagtggagtggaatggagaggaacgaaatggagtgcagtggaatggaatggaatggaaggaaatggaatggaatggattggaatg

SEQ ID NO: 796 - DNA, 140 bp, Protomyxzoa rheumatica
cgttctacaccattccattccactccactccagtccattccattcaactccactccagtccattccactacaatccaattgattccatttcactgcactccattccattccactcctctccactccattcctctccactc

SEQ ID NO: 797 - DNA, 125 bp, Protomyxzoa rheumatica
cactccattccattccattctactccattccacaccacttcattcaattccattcctttccatgtcacccattccattctattctactctactcctttcctctccactcaactccattacattcc

SEQ ID NO: 798 - DNA, 192 bp, Protomyxzoa rheumatica
caatggcatggaatggaatggaatggaagggagggcattgcagtggagtggaatgaaaggagtggaatggagtggcaaaaaggggagtggaatagcatttagtggagtggaatggaatgcagtggaacgtaaaggaatggaatggaatagagtggaatggagtgcagcggaatggagtgcagtggagtggaa

SEQ ID NO: 799 - DNA, 395 bp, Protomyxzoa rheumatica
acttcactcaaatccactccattccactccaatccactccgttccacttcattccactccactccaatccactctactccaattcagtagattccatttcactccactccactccattccactccagtccactacattccaatccattccattccactccactcaaatcccctccattccgttccactataatccattctgttccactccattccactccaatccactccattccacttcactccttttaattccactgtactacattccattccattccactcctctcctctcctctccaattcattccattccactccatttctttccactcaactccagtccactctattccactcctctctattccattccattccactcctctccattcc

SEQ ID NO: 800 - DNA, 161 bp, Protomyxzoa rheumatica
cgacaacattaatacaactagtcaactactatgttacaagtttctgtccactaatttctttctctaattacatctgaatctgtaagtacataaacatgtatgtacatatgaacacatgagtgtgtgtatatacacaaaaatttatgtaataaaagagcaat

SEQ ID NO: 801 - DNA, 172 bp, Protomyxzoa rheumatica
ttccagtcggtttgactccatttcattccattccattccattgcattccagtccagtcgggttgattccattgcattccattccattccaatccattccttaattttccattccatttcactccggttgatgccattccattccattccattccactctggttgattccatt

SEQ ID NO: 802 - DNA, 404 bp, Protomyxzoa rheumatica
tccactccattccattccactctattccattcgtctccatttcattccactccactgcccaactttccgttccattccattctactctgttgcactccattccattccactccactccactcaactacattccactccattccattccactccattccaatcaactcgactccattccattccactccactgcactccactccattccagtccattccattccattccattctattccattccactctattccattcaactttgctccatttcattccattccataccaatcccttccattgccttccattccattccgttccattccactccattccaaaccactcctttccactccactccactccattcctctccattccattccaatccactccactcca

SEQ ID NO: 803 - DNA, 174 bp, Protomyxzoa rheumatica
cacatgcctccccgtgatacacaacacacagcacacacacacacaacacataaaagtacacacacaccacacatactacatgcaccacacacaatacacatgcacacacacaccacacacaataaagcacacacacaacactcacaccacacacaaagcacacacacactgcat

SEQ ID NO: 804 - DNA, 273 bp, Protomyxzoa rheumatica
taactaagtatctgcatattagacgtattagactgcgtattaggcgcagatacttagttatttctttgacgggaggacatgaagggaaatgaaatgattctcaaattcatctgtggaataaaaatatgggatataatatgagaataatatgaagtaggactatccctatcaagcaataaaatataaatttaccattccacttctgtgaatcatcattatttctactgttctgaattgttcccatcatgttccaggatacataatcttccataa

SEQ ID NO: 805 - DNA, 170 bp, Protomyxzoa rheumatica
cttccattctattcctttccattccattccattacattccattacattcgtttccatttcattcgagtcagctccattccattccagtccattccattcaatgcaattcctttcgattgtattccattcaactccattccattccattccgttccttcttattccatgcc

SEQ ID NO: 806 - DNA, 184 bp, Protomyxzoa rheumatica
tcctttcgattctattccgttcaagtccatcacattcgtgtccattccattccattccaatccattcgatgccattccattggattctattcctttcgactccattccattccattcctttccaaccatttccattcacttccatccgtttcaattccattctgttcctttccattccattcca

SEQ ID NO: 807 - DNA, 123 bp, Protomyxzoa rheumatica
ccattgcattccactccacttcactccactgcacttcattccgttcaattccattccttccattccattccattccagttttatccattcaattccattccaacccattccattccactacat

SEQ ID NO: 808 - DNA, 153 bp, Protomyxzoa rheumatica
tacacacacaccacacacacatatgcaaacacaccacacacacatatacatacacagcacacacagacacacacacatacacacagatacacacacaccacatacgtacaccacacacacatatacatatacatcacacgaacatacacaaac

SEQ ID NO: 809 - DNA, 131 bp, Protomyxzoa rheumatica
ttgaatggaatcgaatggaatcattggatggaatcgaatggaatcactgaaagaactcaaatggaatcattatgtggattcaaatggaatgatcatatgggatcaagtggaatcatcgaatggtctcaaat

SEQ ID NO: 810 - DNA, 208 bp, Protomyxzoa rheumatica
ctattcatcgtggcttggagaaggggtggcgactagcttcgtaacttgtcggaagatcgagaagtcagaaactcgatacttatcaaagcgagatttcggatattctgtccgtcttccggtggtccggtcaatcttgttgccgttgaaccatatagatcttttgccggcatttcgtccgttgcggttttgaacagcctcttcaatgaaa

SEQ ID NO: 811 - DNA, 206 bp, Protomyxzoa rheumatica
cgattccagtcagttcgattccattttgtaccagtccattccattcgaatccattccattccagtccattcctatcgataccattccattcgattccattccatttgattccattccactcgattacactccattccactccattgtattccaatctattccattccttttcatcccttaccattccattttattacattccatta

SEQ ID NO: 812 - DNA, 141 bp, Protomyxzoa rheumatica
atggaatggagtggaatggaatggaatggattggaatggagtggagtggaatggaatgaaaaggaggggagttgaattggatgaaaagcaatggaatggaaagagtggagtggaatggaatggaatggaatggaatggaat

SEQ ID NO: 813 - DNA, 194 bp, Protomyxzoa rheumatica
tccattcctttccattccattccattccattcctttccataccatcgtattccattccattccattcgcctcggtttcattccattccattccattcctttccattccatccaactcgcgttgattccattccattcctatccattatattcctttccattccattcctttccattccactcgggttgattcca

SEQ ID NO: 814 - DNA, 174 bp, Protomyxzoa rheumatica
ttcaattgcgttccactcaaatcttcactccactccactccattcctttaaattccattgcattccactccactccactctgttcaattctattccttcccattccattcctttccagtcgattccactccactccactcctatccattcaattccattccaccccattccatt

SEQ ID NO: 815 - DNA, 124 bp, Protomyxzoa rheumatica
aacttaaaattagcaatagacagacaagtggaaaatctctaaatacagtgagataaaagaacaccttctaaataatgaatgcatcaaataagaaatctcaagataaattaatattttattgtat

SEQ ID NO: 816 - DNA, 218 bp, Protomyxzoa rheumatica
tgatcaattctcttctttcccattccattccattccattctattccattgcattctatggcaatccactccattccactccactcgattccactccactccattcctttcctttccattgcattacactccactccactccattcaattccagtccttcccatttcgttccattcaactccattccactgcaccccactccacccctttcaattccat

SEQ ID NO: 817 - DNA, 144 bp, Protomyxzoa rheumatica
tgtgcttatgtgtggtgcgtatgatgtatgtaggatgtgtatgtatatatgtatgtggtgtgtatgtgtggtgtgtgtgttggttgtgtatgtgtgatgtgtgtggtggatgtgtgtgatgtgtgtggtgggtgtgtatctgtg

SEQ ID NO: 818 - DNA, 160 bp, Protomyxzoa rheumatica
gaatggaatggaatttaatacaattaaatttaatagaattaaccccagtggaatggaaaggaagggaacggaatggaatggaatgaaccaaaacggaatggaatagaatgcaattgaatggaataaacccggacagaatggactacaatggaatggagtg

SEQ ID NO: 819 - DNA, 146 bp, Protomyxzoa rheumatica
aatccactccacaccactccactcaattccaatccgttccattccactccactacactccattcatttccaatccattctacccaattccattgcatttcactccactcctttcaagtccaccccactccgtttcattccagtcct

SEQ ID NO: 820 - DNA, 135 bp, Protomyxzoa rheumatica
agaggtggccagcttccaggccttgctcagccaacagccacatctcaggtccctatcccccagcccctgcttataacagcccctgtgtgctggggcctggacccccaggaaaaccccgtgagaccctcagcccca

SEQ ID NO: 821 - DNA, 149 bp, Protomyxzoa rheumatica
aaaacaaatggctgatgccaatgctggccttcaggtgatgtgtgtgatgactgtttttatgccatttcaaggtcagaagcagtggcaaggtcttatctatcggagtggacaccacctgtggcttcagctcaggatccaggagacgtggg

SEQ ID NO: 822 - DNA, 244 bp, Protomyxzoa rheumatica
aatggattccactggaatggagttgaatggaatgcaattgaaaggaaaggaatcgaatggaatggaatcaaaaggaatgcaatcatgcactagaatgaattggacttctttggattggactcgaatggataacaattgaatggaatggaattgaaaggaatggaatcaaatggaatggaatcgaatcgaatgcattggaatggaagggactcaaatggaatggactggaatggaatggtcttga

SEQ ID NO: 823 - DNA, 162 bp, Protomyxzoa rheumatica
tgctgtggcgtggaatgtaatggagtggagtcgagtgaggtggaatggaatgaagtggaatggagtggagtggagctgaatgaaacggaatggaaataaatggattggaatggaatggaatgcaatggagtgtagtggaatggattggaatagaatggaatg

SEQ ID NO: 824 - DNA, 135 bp, Protomyxzoa rheumatica
tggaatagaatggactcgaaaggaatggagtcaaaaggaatggaatcgaacagaatggaatcgaatgaaatggaattcaatggcatcgaaaggaatagaatggaatggagtgcaaaggaatgctatggaatggaa

SEQ ID NO: 825 - DNA, 202 bp, Protomyxzoa rheumatica
ttcatggcattccactccattccattgcacgccattccagatcaatctactccactccattccaatccattccactcttctccactccaatcgtctccgttccattccattaaattccgttccatttgacaccactccactgccctccattccatcccattccattctattccattccactccacaccatttaattccacta

SEQ ID NO: 826 - DNA, 169 bp, Protomyxzoa rheumatica
ggaatggaatggagtgcagtggaatgcaatggtgtagagtggtgtggaggggagtggagtggagtgaaatgttgtggagtggagtggaatggagaaaaacggaatggaatggagtggaatcgaatggagaggaatggaatggagtggaatggagtggaatggaatggaa

SEQ ID NO: 827 - DNA, 128 bp, Protomyxzoa rheumatica
ggagtggaatggaatggagcggagagaaatggaatggagtggaacggaaatgaatggattggaaaggaatgatatggagtggagtacaatggagtggactgaagtggagtggagtgcagcggagtgta

SEQ ID NO: 828 - DNA, 127 bp, Protomyxzoa rheumatica
gcactccactccattacattccactccactccactcaaatccattcaattccattccactaaactcctttcaactccactccacactattccattcccctccattccactgcactcctctccattac

SEQ ID NO: 829 - DNA, 150 bp, Protomyxzoa rheumatica
attccattccattgcattccattccattccattccattgaattccattccatttcattccattcctatcttgttgattccattcaattcgaatgcactacattccacgcaggttgattccaatccatttcattccattccattccattcc

SEQ ID NO: 830 - DNA, 150 bp, Protomyxzoa rheumatica
acaatcttttactttctacttattctattaaagtatataaattataattgaaatattttctgtagccaatatgtcatcagggtcataaaaacaagaaaattaaattagatctgtttttgaattgatattttctttttaacttgtctcgtt

SEQ ID NO: 831 - DNA, 154 bp, Protomyxzoa rheumatica
tcctattaacttgcaataatatgtcttccaagtgatgaacaagaaaaaatgttctttgtaatataaataaaatgtgcaatttcagaagaaagttctaaacaggtttaaatgtcttcagtattccccttaaggaagctgaattacgtagcatcat

SEQ ID NO: 832 - DNA, 130 bp, Protomyxzoa rheumatica
ggaatggaatgcaaatgaatggaatgggtgctgtgattgtgcaactgtgctacagcctttgtgaaaaagggagatcctgtcgaaataaaggaatggaataggatgtagtggattggagtggtgtggaatg

SEQ ID NO: 833 - DNA, 143 bp, Protomyxzoa rheumatica
agtgtaatggggtggattggagttgagtggagtgtagtggagtggaaaggaatggaatgtaatggacttgaatggaatagaatcgtatggaatggaaccacaatgaatggaatcgaatggcattaaatggaattaaatggaat

SEQ ID NO: 834 - DNA, 180 bp, Protomyxzoa rheumatica
ctgatcttgcctccttgagtatatccacaccaatacgaaagtgtatttttttaaaaattgattatgacatgttgctgctaaaaatgtatctttgtgtttctcctattactaatgagtagagcccagctttttatgctggacagcaaaggcctttttctttgaagtctttatttccagtgc

SEQ ID NO: 835 - DNA, 208 bp, Protomyxzoa rheumatica
ccattccattccactctaatccactccactccgttccactccgatccactccgttccactggactacattttattccagtccaatctattcgactcaattccattcaactccaatccatgccactccaatccactccattccactacactccattccattcctctaaaatcctttccattccattccactccattccattccactcca

SEQ ID NO: 836 - DNA, 261 bp, Protomyxzoa rheumatica
ccattccattccattcccatctgctccgtcccattccatccctttccattcgggttgattcaattcaattcctttacactccattcccttccattccacgcaattccattccattccattccatttcatgtgggttcaatgcattctattcctttaggttccattcatttctattccgtagcattcaattccattacattcaattccattccatgcctttctactcgggttgattccattccattccattccatttcattc

SEQ ID NO: 837 - DNA, 443 bp, Protomyxzoa rheumatica
ggagtggagtggtatggaattggatggaattgaatggagtggagtggagtgggatggagaggagtggagtgggatggagaggagtggagtatagtgaagtggaatggaatgaaattcaatggaatggagtcgaggggagtggagtggagtgcagtggagtggaatggaatgtagtggaatggaattgaatggaatgatgaagtgaaatatgagctgagattgtagcactgcactgcagcctgttggaaagagtgaaatactgttgaaagaaaggaatggaatggaaaggtgtggaatggaatggaatggattggagtggagtggagtggagtacagtggaatggagtggaatggattgggatggagtgcagtggagtggagtggagtggaatggaatggtattgtatggaatggaatggaatggaatgaaatggaatggaatg

SEQ ID NO: 838 - DNA, 127 bp, Protomyxzoa rheumatica
gattccattccattccatttgatgatgattctgttcgattccatttgatgatgattctgctcgattccatttgatgacgattccattcgattccatttgataatgattccattggatttcatttgat

SEQ ID NO: 839 - DNA, 230 bp, Protomyxzoa rheumatica
ggagtggaatgaaatggagtggagtggagtgcagtggaatgcagtggagtgaagtggaatggagtggagacgagtggatggagtggagtgcaatgaaatggagtggagtggagtggaatggagtcaaatggaatcagaaacaaaggaatgtagtggcatagagtggatttgagttgaatggaatggaacggaatgtgtgctgagattttgccactgcaccgcagcctgtg

SEQ ID NO: 840 - DNA, 165 bp, Protomyxzoa rheumatica
ttccattccattccattcgactacactccgttcctttcccttccactctattccattgcaatccttcccattccacaccactccgtttcattccacaccattccactccatcccattccaatctgttccattcctctccacaccattccattgcattccactcca

SEQ ID NO: 841 - DNA, 176 bp, Protomyxzoa rheumatica
tatgtcaaagcttacattcagcgaggctgatcaacagatagacttgatggcgatccctaagaagtttcgcggtacttacgcagcttgggaaactggccgggattgtcgtcaactactgtctaagacgacgttctacctgcatcgttcggagatccggaagcttaccggcgtcgata

SEQ ID NO: 842 - DNA, 492 bp, Protomyxzoa rheumatica
aatggaatgcagtggagtggaataaaatggagtggagtggaacggaatggaatggagtgtaatgaaatggagtggagtggagtgcagtggaatggagtggaatggaatagaatggtgtggaatgaagtggaatggagtggaatggagtggagaatgtggaatgcaatggagtggagtggaattgtgtggaatggaatggagtggagtagaatgcaatgtattggaaaggaatgaaatagactggagtggaatattatggattggagtggagtagagtggagtggagtggagtttaatggaatgcagtggtgtggagtggagtggaatggaatggagtggagtggactacagtgtagtggagtgaaatggactggaatggaatggagtggagtagagagaagaggattggaatggataggagtggaatagactggaatggaatggtgcagagtgaaatggagcttaccagagtggaaaggagtggaaaggaat

SEQ ID NO: 843 - DNA, 165 bp, Protomyxzoa rheumatica
tccattccattccattccattccatactattccatttgggttgattccattcctttcaataaaattcaattccattccattagggttgtttccattccattccattccattatattgcgttcatttccactccataccacacgcgttgaccccattccatttcat

SEQ ID NO: 844 - DNA, 136 bp, Protomyxzoa rheumatica
tgattccatttcattcgatttcattcctctcaattccattacattcgagtccattcaattcgaataaattccatctgagtccattccatccagtccattccattcgatcccattctattcaatttcattccattcc

SEQ ID NO: 845 - DNA, 169 bp, Protomyxzoa rheumatica
atataagtccttggtgaatttcccagtagacctgtaattccacattggaccttttaatgtacattgtgccagagacatggattcaaaagggaagctgtcctgtccaaagactctacatttcagtgaattcttcagacctattgctgtatcccagtgaccacagtgattg

SEQ ID NO: 846 - DNA, 303 bp, Protomyxzoa rheumatica
tccattccactccactccattccattccattccattccactctacctcatttcactccattctattccactccactcaattccattcctttccactccattccgtcccactccattccattcatctccaatccattcttttccatttcattccaattcctttcactccattcctttccattccaatccattgcactgcactccactctgtacaattctactccattccattccactgcattccacaccgttccattccgttccactacactccattccactccatttcattgcaatgcactcc

SEQ ID NO: 847 - DNA, 321 bp, Protomyxzoa rheumatica
attccaatccacctcactccattccattccactccactccgttccattccgctccactccactccattgcattccactgcactaatctccattccactccactccattcaacaccactccattccattccattccactgctgtccaccccactacactctatttcactccattccactccactccactccaatccattccaatccattccattcctttccattcctctgcactctgatacactccactcaactccattctactcccctgtactccattctgttccactcctttccattccattccgttccattccattcca

SEQ ID NO: 848 - DNA, 214 bp, Protomyxzoa rheumatica
aaggaatggaatggaatcgaattgaatggagtggagtggaatggaatggaaaggagtggggtataatataatggagtgtaatggagtggactggattgcaaaggagtggagtagaatgaaatggatcagaattgaatggagtgaaatggagtggaatggtatggagtggaatggaatggagtggagaggaatgtaatggagtggagtggaatgg

SEQ ID NO: 849 - DNA, 144 bp, Protomyxzoa rheumatica
cattctctaaactccaggtacaataattagtttagttgtaggtatatgttttcaatgcctatgggaaaaacaagtatgtagcagaaagttggaatacacaggtctgaagcttagtaggtgctggttgaaaaaaatttttaaaga

SEQ ID NO: 850 - DNA, 231 bp, Protomyxzoa rheumatica
ttccattccactccactccattccattccactccactccactctatgccattccattccattacataacgttccattccactcccattcatgccattccattcccctccattccacttcattccattacatttcagtcaattccattccattccacggaattcaattcctttccattccattccattgcattccattccattcaattgaattccattccattccaatgcat

SEQ ID NO: 851 - DNA, 135 bp, Protomyxzoa rheumatica
caattccattcgatgccattcgattccattcctttcgaatcaattccattcaattcattccattgaattccattccatttgataccattccattgaagtccattccattcatgtccattccatacctttccattc

SEQ ID NO: 852 - DNA, 128 bp, Protomyxzoa rheumatica
atggaatttgttggaatggaatggaatggagttgagtggaatagaatggaacggacgggaatggaatggggtagacaggagtggaatttaacggatttgaatggagaggaattgaatgctatgcaatg

SEQ ID NO: 853 - DNA, 470 bp, Protomyxzoa rheumatica
ggaatggagtggaatggaatggaatggagtggaatggagtagaatggagtggagtggagtagagtggagtggagtggaatggaacggggtggagtggagtggaaaggagtaaaatggaatggaatttagtggaatgaaatgaaatggagtggagtggagtggaatgcaatggaatggagtttagtggaatgcaatggaatggaagggaggggaatgtaatgaaattaaatggagtggagtggagtggaatggaacagaatggagtggaatgaattggagtgccgtggaattgaatggaatggaatggagtggaatcaaatgggaattaatggaatggaatggaatggagtggagtggagtggaacggagtggaatggaatgtagtagagaggaatggaatggcatggagtgaaaaggagaggagtggagaggagtggagtggaatggaatggagtggaatggaatggagt

SEQ ID NO: 854 - DNA, 193 bp, Protomyxzoa rheumatica
gaaatataatggagtggagtggagtggagtggaatggattcgaatggagtggattggaatggagtggaatggaaaggagtggagtgcagtggaaaggaatcaagtgtaatgcaatgtagaggagtagagtggaatggaatggaataggacggaatggattagagaggagtggtctggaatggaatggagtgga

SEQ ID NO: 855 - DNA, 161 bp, Protomyxzoa rheumatica
aatggactcgaatggaatggaatggacacaaagggaatggaatggaatggaatggacttcaatcgaacagaatgtaatgttatggaatggactagaatggaacggaatgaaatggagtcgaatggatttgcatggaatggaatggaattgaatggaatgga

SEQ ID NO: 856 - DNA, 183 bp, Protomyxzoa rheumatica
acagacagcgcaacagtgtatgattctgttcgtcaaaataatttactcttgatatccaggcgtactatttgagaagtaccgcttagacgggagaaatacgtgcgaaaatcgacaagtcacggtgatttggagttgggattcttcagtgcttttaagcgattgacgagattagcgtactgataa

SEQ ID NO: 857 - DNA, 131 bp, Protomyxzoa rheumatica
cattccatgccattccattccattccattccgttccattcaattcgaatagggttcattccattccgttccagtccaattctttccatgctattcaatgccattccattccattccattccactcggtttg

SEQ ID NO: 858 - DNA, 144 bp, Protomyxzoa rheumatica
aaggcgtatatggatgtgtgtgaatgtataagtgtgggtgtgtaaatgtgtatatggatatgtgtgtatgagtgtgtgtgaagatgtatatgaatgtgtgtggatgtgtgtgaagatgtatatgaatgtgtgtgtatgtgagcg

SEQ ID NO: 859 - DNA, 182 bp, Protomyxzoa rheumatica
gttccattccattacactccactccattccgttccattccaatccactccactccattccattccattccattccactcaaatccattccattccactgcattccataactttccatttcattctactccactccattccactccattccattcaactccattccattccattccattccat

SEQ ID NO: 860 - DNA, 170 bp, Protomyxzoa rheumatica
taaagaatggaatggactccaatggaaaacaatggactcgaatggaatggaatggaatggaatttattgtaatggattcttacagaatggaaactaatggaatggaaaggaatggactcgaatggaatagagtggaagggactctaatggaatggaatgcaatggaatgg

SEQ ID NO: 861 - DNA, 183 bp, Protomyxzoa rheumatica
tccactccactccactccagtccattccattcaaactcattctcttccactccattccattccactccattccattcttctcgactctgttccactccattccactccattacattccactccattgctttacattccattccattgcattccattccatttcactccactccattccactcg

SEQ ID NO: 862 - DNA, 128 bp, Protomyxzoa rheumatica
tccaaacgagtctccttcggagttcccgtcccctggcttcctcagggagggtgctctccgaaggtgtcgggaaggccatcgcgggaagccccagctggaatttcacagatggacacgggcagagagag

SEQ ID NO: 863 - DNA, 151 bp, Protomyxzoa rheumatica
tggagtgtaggggagtggaacggagtggtgtggaatggagtggaatggaggggaatgaaatggaatggaatggagtggactggaagggaatggattggaatggaatgaagtaaagtgtatcggagaggagtcgagtaaaatggagtggaat

SEQ ID NO: 864 - DNA, 160 bp, Protomyxzoa rheumatica
ctgcagagtcactgcagatctaggtctggaaaccatctgtttacatgcagcttctttgtcccaactaagcttcttttctggggatgggatacagttgctggtgtcaccctgaatcagaaagggacctatgggagatgggaacacatcaggaggtctcact

SEQ ID NO: 865 - DNA, 561 bp, Protomyxzoa rheumatica
ctccgttccgttccattccactccactccattccactccattccattacactccattcaatcccactccactccattccattccaatcccctccactgctttccactccattccattccactcctctctcctcattaccaatccattccattccattgcgttccacttcatcccatgcctttccatttcattacattccactccattgcattctgttccactccattccattaaattccattccatttcattctattgccctcctctcccttccattccattccaatctgctccactctattccattcaactccaataaactcttttccactccacacccctcatctcccttccattcgattccattccaatccattccactccactcctttgctctcgattccgttccattccatttcattccattccattccactccaatccattctattccactccacaccccttctctccattccattgcattccattccaatccattcaactccactccattccattctatccactccactcccctcgtttcaattccaatcaatt

SEQ ID NO: 866 - DNA, 139 bp, Protomyxzoa rheumatica
cgattcctttccattcccttcgagtccattacactccatttgagtccactatattccattccattccactcgagaccattccattccattcaattcgtgtccattcctatccattccattcgagtccattcctgtacac

SEQ ID NO: 867 - DNA, 402 bp, Protomyxzoa rheumatica
ttcaatccattccactccactccattcctatccactccactccactccactacattctattccaacccattgcattctattccactacactctattccactaaaatccattctactccactgcattccattccactccacagcactccactccactccactacattcccttccagtcaattccactccattccattcccctcaactacatttctcttcactccacaacaccctgttcctgtctattccattccactccactccatttctttccattccactccactttattgcattccattcaattccactccattgcattccattccactacactccgtttctttccattccactccactttattccattccattccattccactccattccattccattc

SEQ ID NO: 868 - DNA, 149 bp, Protomyxzoa rheumatica
tgaaaccctctatttgtacagtctgcatatggaaatatggacggctttgaagcctatgctagtaaaggaaataacttcatataaaatacagctcagaaacttctttgtcatgattgacttcaagacacagagctgaacattccttttga

SEQ ID NO: 869 - DNA, 191 bp, Protomyxzoa rheumatica
tggagtggattggagtggagtggagcggaacagagtggaatagagtggagtggattgaaatggagtggagttgaaaggagtggaggttaacggaatggagtggaatggaacagaatggaaaggattggaacagaattgaacagaatgcagtggagtggaatggaatggaatggaatagaggggagtgcagt

SEQ ID NO: 870 - DNA, 198 bp, Protomyxzoa rheumatica
ggaatggtatggaatggaatggaattgaatggaatggaatcgaatggaatcgaaaggagtcgaatgcaatgcaatggaaatgaatggaatggaatccaatggaatgcggtgaaatggagtggagtgggttggaatggagtggaatgaaaaggggtggaatagaaatgaatggagtggagtggagtagaatggagtgga

SEQ ID NO: 871 - DNA, 126 bp, Protomyxzoa rheumatica
cactctgatgcactccacaaaactccaatccactccactccactcctatccattccaacccattccactgcaatccactccattccattccattccattctgttccactgcactccgttccactcc

SEQ ID NO: 872 - DNA, 150 bp, Protomyxzoa rheumatica
ttaattgaatgcaatgaaatattatggaatggaatccaggggaagggaatccaatggaatggactgcaatggaatggactggaatacaacagactcaaatataatgaattacaatataattaattcgaatggaatgcaatcgaatgcaat

SEQ ID NO: 873 - DNA, 176 bp, Protomyxzoa rheumatica
tggaatggactggaagaaaatggaatcaaacggaattgaatcgaatagaaacgaatggaatggaaaggactcgattggaatgaattcgaatggaatggaattgaatgtaatggaatcgaatagaatggaactgaacggaattgaaaggaatagaatggaatggagtgtaatggaaa

SEQ ID NO: 874 - DNA, 168 bp, Protomyxzoa rheumatica
aatggatgtaatggaatcgaatggaagtgagtgcactggagtggagtggagtgtaaagaaatggaatggagtggaattcaagggaatggaaagggaaggaatggaatggaaaggaaaggaatggagtggagtggtttggaatggaatggagtagagtggaatggaatg

SEQ ID NO: 875 - DNA, 323 bp, Protomyxzoa rheumatica
gaaatggagtggagagtaggggattggagtggaatggaaattagtggaaagaagtgtagtggagtggattggaatggaatgtgctggagttgaatggaatggaatggaatagaatggaaacgaatcaaatggaacgaaaaggagagaatggaatggagtgaagtggagttgaatggaattgagaggagtggaatggaatggaatgaaatggagtggagtggaattaagtggtgtcaagtgaaatggaatataaccgaatggtatggaatttaatggaattggatggaatggaatggaatggaaaggaatagaatgctatggac

SEQ ID NO: 876 - DNA, 133 bp, Protomyxzoa rheumatica
aaaaggaatcatcatcaaaaggaaacgaatgcaatcatcatcaaatggaatcaaaaggaaacatcaaatggaatcgaatggaatcaccaatgaattgaatcgaatggtatcatggaatggaattgaatcatct

SEQ ID NO: 877 - DNA, 125 bp, Protomyxzoa rheumatica
attccattccattccattccattccattccattcgagtctattcctttccattgcacagcattcgagtccattccacagcattccatttcattcgagtcctttccattcatttccattcctttcc

SEQ ID NO: 878 - DNA, 352 bp, Protomyxzoa rheumatica
tgcaatagtatggaatcgaatcgagtagagtggaaacgaattgaatgaactggagtggaatggactgcaatagaacggacttgaatgttatggattgaaatgtaattgattcgaatgccttggaacagaatggaatgtaatcaaatggaatggaatggaatgcaaaggaatggaatgcgttggaatggaacggagtggaattgagtggaatggaatcgaatggaatgaagtcgaatggaatggaatcgaatggaatggacagaaatggaatggactcgaatgcaattgactggaacaaaatgaaatagaacggaatagaatcaaacggaatgcaatggagtggaatggaatg

SEQ ID NO: 879 - DNA, 325 bp, Protomyxzoa rheumatica
agtggaatggagtggagaggagagaagtgcaggggaatggagtggaatacagtggaatggagtgtaacggaatggagtggagtagaatggagtagggtggagtggagtagagtgtaatgggatggcgtggagtggagtggagtggaatgtaatggagtttcatggaatggaatggagtggagtggagttgagtgaaatgcaatggagtggaatgcagtggaatataatggaatggaatagaatgtaatggaggaatgaaatgtgagctaagattttgccactgccctctggtctgtgtgacagtgtgagatccattcgaaataaa

SEQ ID NO: 880 - DNA, 138 bp, Protomyxzoa rheumatica
atgtacatggtgtgtacatgtggtgtatacctgctgtgtgtgtgtggtgtgtatgtgtggtgtgtgtgcatggtatgtgtagtgtatgtgttatgtgtgagtggagtatgtgtgtggtatgtggtatgtatatgtgtg

SEQ ID NO: 881 - DNA, 125 bp, Protomyxzoa rheumatica
atggaatacaattgaatggaatggaatggaatggaatagagtgcaatgcacagatatcgtgtggaatggaatggagggcaatgcaatgatatcgtgtggaatggaatggaatggaatggaatgga

SEQ ID NO: 882 - DNA, 129 bp, Protomyxzoa rheumatica
tggaaacattcggaaaggagtcaaatggaatggattcgaatggattgccattgagtggaatggaactggatggcatcgaacggaattgaatggaatgaggtgaagtgcagtggagtggaatgcagtgga

SEQ ID NO: 883 - DNA, 171 bp, Protomyxzoa rheumatica
catctaatggaatcaaaggcaatcatcgaatggaatcaaatggaatcatcgaatggaatccaatggaatcttcgtcaagtgtaattgagtggaatcatcgaatggaatcgaatggaaacatggtcgaatggaatggaatggaatcaatgaatggaattgaatggaatcacc

SEQ ID NO: 884 - DNA, 142 bp, Protomyxzoa rheumatica
cattccattccattgcattccattccactccattccactcgacatgattgcattccattctattccattccattgcgttgcattcctttccattccattccaaaagtgttgattccattccaatcaattccactccattcca

SEQ ID NO: 885 - DNA, 125 bp, Protomyxzoa rheumatica
agagccgtactgaaactgtactttggtagaatctccttgtgtatatttggagctgtttgaggatttcgttttaaagaagacatcttaaataaaaactactgagaagaattctcagaaactgtttt

SEQ ID NO: 886 - DNA, 152 bp, Protomyxzoa rheumatica
ggaatggaatggaatggagtggactggagtggagtggagtggactggagtggattggaatggcgaggaatagaacgggatggaatggaaaggaatgaagtggagtggagtggggtggagtggagttcagtggaatggagaggagtggagttc

SEQ ID NO: 887 - DNA, 149 bp, Protomyxzoa rheumatica
tcgagtctattctttggagacctttccattcgagtccattgcattccagaccattcgcgtccattccattagaatccattccattcgaattcattccatttgaatccattccgtttctgtccattccattccagtccattccattcgat

SEQ ID NO: 888 - DNA, 147 bp, Protomyxzoa rheumatica
gaatggagtggaatggaatggaacagagtggagtgttgtggagtgaagttgagaggagtggattgtagtgcagtggaatggaaatggagtggagtggagtggattggagtggaacggagtgaggtggagttgagtggattggaatgg

SEQ ID NO: 889 - DNA, 305 bp, Protomyxzoa rheumatica
ttccactgctctccactccactccattccactccattccattccattccattgcaatccactcccttccattccgttgctttcaattccataacattcctttccattcaatttcactcctctcgatccctttcacctccactccattccatacaattccattccattgcattctatttcattccccttcactcccctccattgcatttcactccactccactctactccattccattcaattctataccactccattttattccattaaactcctctccactcaattccattgaattccattcca

SEQ ID NO: 890 - DNA, 136 bp, Protomyxzoa rheumatica
tccaattcaatcaactccactccactccactctgttcctttccattccattccagtccactccattccacgccattccactcgattccattccattccactctcctcctttacattccattctactccattccgtt

SEQ ID NO: 891 - DNA, 345 bp, Protomyxzoa rheumatica
tcgaattgaaaggaatggtgtggacccgaacagaatggattggaatggaatgaaatggagtctaatagaatggaatggattgtactcgaatagaatggaatggaataaactggaatcgaacagaatggaatggaatggaatagaatggaatggaacggaatggatacaaatgaaatggaatggaatggagtggaaaagaattgaacggaatggaaagcaattgaacggaatggtatggaaaggaatagaattgaatgaaatagaatggaatgcaatggactcgaaaggaatggaattgaatagtctcgaatggaatggaatggactcaaaaggagtgaaatggaa

SEQ ID NO: 892 - DNA, 130 bp, Protomyxzoa rheumatica
atggaatcaactaaaatggaatgcaatggaatggaacagattggaaacgactgcaatggaaacgaatggaacggaatcgaatggaatggaatctaacggtatggactggaatggaaagggctcgaatgga

SEQ ID NO: 893 - DNA, 156 bp, Protomyxzoa rheumatica
tggaatcgaatggcacggaatcaaatgaaatggaaaggaaacgaatggtctggaattgaatgcaatggaaatgaatggaatggaaaggaatgaaatggaatggacacgaaagtaatggacttgaatggaatggaatggaatggaatggaatggaat

SEQ ID NO: 894 - DNA, 131 bp, Protomyxzoa rheumatica
aacatcatctcctctttttgctctgtttcgctctttgttctgttttgctctgttttgtttttggctctgttctcctctgtttttgcaagtgtgtatctgtttccaacgtggattgaaaataatttttttta

SEQ ID NO: 895 - DNA, 170 bp, Protomyxzoa rheumatica
attccattcgatgattccattcaattctattcgaaaatgattccaatcgattccattcgatgatgattccattgaattccattagacaatgattccattcgattccattcgatgattccattttactccattcgatattgattccattcgtgtccattcgatgattccat

SEQ ID NO: 896 - DNA, 168 bp, Protomyxzoa rheumatica
gaatggaatggaatggaattgaatggagtcaaatggattggagacaagtggaatgaaatgaaatggaacggaatgtaatggaaatgaatgtaatggaatgaaatgaaatggagtggagtgcagtggagtggaatggagtggagtggagtggaatggaatggaatggaa

SEQ ID NO: 897 - DNA, 344 bp, Protomyxzoa rheumatica
aattgcattccatgccactccaatcgattccattctattccacttctttccacacgattccactccattcctctccactccaatcctctcccgtccactccatacatctccactccattccatttcattccatcccattccacttgtttccattccattgcattcctttccattccatgccactcctctaaattccattccattctactctactccactacattccatttgattccattacgttccactatattccattcccttccattccattccattctgttccactctattccaatccattcttttacataccactctattccactccattcctgtccact

SEQ ID NO: 898 - DNA, 185 bp, Protomyxzoa rheumatica
gagtggagtggaatggaatggagtggaatggaatggagtggcgcagaatgaaatggaatgtaaaggaatggaatgtataggaatgaagtttaatggagggcaatggagtggagtataatggaatggattggagtggaatggaatggagttgaacggaatggaacggagtgcaatggaatggagtt

SEQ ID NO: 899 - DNA, 131 bp, Protomyxzoa rheumatica
cagagctccctcttctccaaggcacctcagccttttttctatgaaggccttcagctgattggctgagatccaccacgtcccaaacggtaacctgctttactccaactctactgatctaagtgttaatctca

SEQ ID NO: 900 - DNA, 242 bp, Protomyxzoa rheumatica
tccattccattttactccactccattccattccattcaattccactccattcgatcccactccattcgatcccactcctttcgatcccattccatttgattcaattccattttattccattcaatttgaatgttttccattcgaggccattacattggagtccaatccattccattgcatttcatttcattccattgcattcgattccattccattccattgcgttcttttccattccattc

SEQ ID NO: 901 - DNA, 338 bp, Protomyxzoa rheumatica
gaagagacatgaatggaatggaatggaatttagcggtctagaaaagaatggaatggaatgtaacggaatggacacgaacggaatggaaaggaattgactcgaatggaatttaatggaatggacccgaatggaatggaatagactcaaatggaatggaaaggagtggaatggagtcgaaaggaatggaatggaatgaactcgaatggaatggaatggcatagaatggactccaatggaatggattggaatccactcgaatggaatggaatggaatggaatggaatcaaaaagaatgtaatggaatggaatggaatatattctaatggaatagaatggaa

SEQ ID NO: 902 - DNA, 257 bp, Protomyxzoa rheumatica
ccattccactccactccattccattcctttccattccattgcactccactccactccattccattccactccattccaatacatttctctctattccattgcattctactccacgccatccctttctaatccaatccattccattccatgcaattccattccattccacgctattcccttccattccactccactccatttcattccacttcactgcaatccattccattccatgcgactccattccattccactcc

SEQ ID NO: 903 - DNA, 252 bp, Protomyxzoa rheumatica
ttccattctattccattccatttgattccagtgcattcgagtccattccgttccattccaatcaattcgaatctattcctttccagtccagtccattcgtttctattgcatttgattccattccattctattctattccattccattccatttaaatcgattgctttcccttccattccattccactccattcgattctattccaatcgataccattccattcagttcgattcctttcatttctattccatt

SEQ ID NO: 904 - DNA, 162 bp, Protomyxzoa rheumatica
ctccctctttctctgtccctccctccccttctcttttcctcccttccttctgctctctccctcctttcctttctctccctcccttcctctctcaatcccttcctccctttctttctcccacccttcctcctttctccctccattcatccctctttatctgtt

SEQ ID NO: 905 - DNA, 252 bp, Protomyxzoa rheumatica
ggaatggaatggaatggaatggaatggaatggaatgattttgaatcgaatgacatggaatggactcgaatggaatgggttgggattggttggtctcaaatggaatggaatggaatggactcaaatggaatggaatggaatggaatagaatggactcgaatatagtggaatgaaattgcctcgaatggaatggaatggattcgaatggaatggaatggacacgaatggaacagaaggcaatggacttgaatgg

SEQ ID NO: 906 - DNA, 158 bp, Protomyxzoa rheumatica
cattatgtatataataatatatagaatcatatatataatatatgtaacatatatatataatactgttttacatcctgcagttatattatatatattatatgtattataataactggtaatgtataagtattatatttatacactgtgacatataataa

SEQ ID NO: 907 - DNA, 141 bp, Protomyxzoa rheumatica
atagagtgcagtggagtggaatggaacggaaaggaatgtaaaggaatggagtggaatggattggaaaggaagggaatggaatggaaaagagtggagtggaatcaaatggaatggaggtgaagggaatggaatggaatgcaa

SEQ ID NO: 908 - DNA, 222 bp, Protomyxzoa rheumatica
attccattccattccattccattctattccactcaagttgattacattgcatcccattccattccattcccctccattcctttccattccattgcattccttgccattccattccattcatctcgggttgattccattccagtccatttcagttcattccatgccattccattccattccatacgcgttgataccattccattccatttcattccattccat

SEQ ID NO: 909 - DNA, 209 bp, Protomyxzoa rheumatica
gaatggaaaatcataaagtggattggagtggaatggagtgtagtggattttaatgaagtggaaagcaatggattgaaatggaagggagtggaatggagtggaatttaatggaatggagtggagtggaatggattggagaggaatggaatggaatggaatagaatggagtgttatggaatggaatggagtggaatggaatagaatgtagt

SEQ ID NO: 910 - DNA, 137 bp, Protomyxzoa rheumatica
gcatggaatggaatcgaagggaatggaattgaatggaatacaaaatagtggaatggaaaggaaaggaatacaatgaaaacgaatggactaaagaaatggacaagaatggaataaactcgaatggaatggactcgaat

SEQ ID NO: 911 - DNA, 168 bp, Protomyxzoa rheumatica
atagaatggaatggagttgaattcagtggaatggaatggaatggactggaatggaattgaatggagtggagtggagtagaacagaatggaatggaaggcaatggaatggactcagatggaatagacaaaaatgaaatggaatcgattggaatggaatggaatggtctc

SEQ ID NO: 912 - DNA, 138 bp, Protomyxzoa rheumatica
aatggactcgaatggaatggaaaggaatggaatagaatggactcaaatggaatggcatggaatggaatggaatggacacaaatgccatagaatggaatggactcgaaaggaatttaatggaattgactcaaatggaat

SEQ ID NO: 913 - DNA, 133 bp, Protomyxzoa rheumatica
gttttattgtaaatattacttcttgctatctgtctttaagaatgttggaaaactaaatgtttatgtaatatgtttatatagagcactttttaacatatttgtataagcaacatataaattttatctgcattct

SEQ ID NO: 914 - DNA, 324 bp, Protomyxzoa rheumatica
cattccattccattctaatgcattccgttccattcctttccactccacttgattccactacattctactccaaaccgttccactcctttccactcctatccatttcactccattcctttccacttcactccactccattctactacattctattccactccattcctttccaatccactccactgcagtgcattccactccaacccattccactgcattcctctcttctgcatccctttccattctattcgtttccattctattccactcgattcgaatccactcgactccattccactccactccattccattccactctgtt

SEQ ID NO: 915 - DNA, 142 bp, Protomyxzoa rheumatica
tttcttttgatagagcatttttgatccactgatttgtaggatctgcttctggatatttgaaggtcttggggtattctttgtaaacagtatgtcttcacatacaaaccagacaggagcatttaactgcttggtaatgtgtgcg

SEQ ID NO: 916 - DNA, 146 bp, Protomyxzoa rheumatica
gcacatatacaccacaccacacatataccacacacacaaaccccatctacacacacagcacacacacagcatacacataccacatagaccacacatacacatatacacaccacacgtgcaacctgcacacaccccctacatacaca

SEQ ID NO: 917 - DNA, 419 bp, Protomyxzoa rheumatica
cattcctctccactccactccattccattccacttcaatccattccactccattgcattccagtcctttccattccactcaactccacacctttccattcaattatgctccactccatttcactccattccattcgactccactccactccaatccattccactccattcctttccactccattccattcccctccactccgttccactccattccattccactccactcattccattccattccattgcacttcactccattccactccattccaatgtactccactcctctccaatccattccactccttcccattcctctcctttccattccactggactttattccactccattcaagtcaatccattcaattcatctccattccattctattccactcgaccccactccactcc

SEQ ID NO: 918 - DNA, 148 bp, Protomyxzoa rheumatica
cctgccgcgtcatgcttcttctcggcctcgggcacctcctcaaagtcttctgatagcgatagttggcgcctagcttcgtcatacgccgtcgtagaagaggcgataagattcttgaacccaatatctaaagtcattccgcggatcggct

SEQ ID NO: 919 - DNA, 293 bp, Protomyxzoa rheumatica
tgtaacggcgcacgactttggacagttcagaagtgtgctgaatcgggctatcgctacaattttaacaggatcaaatcacccaagagcgataaaccataggctttcatctgttctgcagggaacgaaaatcgatcggaagttaaggaatcgaaggatgtctcaagatggagtggctgaggcaagaaagtttattgaaatggccgcaagagagttcgatggtgtgaagaagaggtctgtttcgaagaagttatttaagaggtatcgaccgttgctagatgagctctatcggcgaa

SEQ ID NO: 920 - DNA, 238 bp, Protomyxzoa rheumatica
tcatcgcgatatcaagcctgacaatattataatcttagataactaccatagagcggtactgctcgatctaggcgtactccggccaatgtcaggatcggacttaaccgacaatgatggaattcaggcattcatcggcacattacaatacagctcgccggaattcctgctgagaaacgaagagcagacgcctgagggatatcgctcgttaacattctaccagctgggcgcagtcctgcat

SEQ ID NO: 921 - DNA, 157 bp, Protomyxzoa rheumatica
ggagtggaatggagagtaattgaatcgaatggaatggaattgactggaataaagtggaaatgaacggattggaattgaacggaactgaatggaatggaatggaatggaacatactggaatagaatggattccaatggaattcaatcaaatggaatgg

SEQ ID NO: 922 - DNA, 210 bp, Protomyxzoa rheumatica
gtggaatggaatggaaaggaatggaatggaatggagtggattagaatggaacggaatggaatggaatccacccgagtggaatggaaaggaatggatttgaatgaaatagaatgaaatggaatggaatggaatgcaatggagtggaaggggttggaattaaccacagtagaatggaatagaatggaatggattggaatggaatggaatgga

SEQ ID NO: 923 - DNA, 261 bp, Protomyxzoa rheumatica
tgaatgaaatccaatctaatcagctgtataggcggattaagaactaaccccccccactcgaagcgaggtaaaccccggccaccagctattggaaacccgaaattttccagattgccttactaatctgcgtaccgataggtacaccaaatttctcctcgtctctaaatcaatcggcgacaggattcgttttcagttccggaaggaaatcggcgaacctgcatgagatggagagaagcattgtactcgcgcccgccctcgtcg

SEQ ID NO: 924 - DNA, 364 bp, Protomyxzoa rheumatica
gtttgctgatgatgagtacgagacctttcagacaataaagagagcttgcgaaagaggtggttttaagtgcattcgtggtgatgaagagtatacaccttccgacattctcgggcacatagtacgactgattacaaaggcgcgtatcattattgcgaacgtggactcaagaaatcccaacgtgttctacgaactaggtatcgctcatgcacttagcaagcctacgattattatatccagatctctgtcagaggttcctttcgatatgcagggttttcgcatcttaacttggacgagctacaacgaactgcatcaagatatccaagaatatgttctgaagacgcttaacgcggaagcctgacaggtt

SEQ ID NO: 925 - DNA, 237 bp, Protomyxzoa rheumatica
attagaatggaatggaatggagtggaattgagtggagaggaatggaatggaatagaatgaaatggaatggaacagagtggaatggaatgtaatggaatgtagtggagtagagtggaatataatggaaagtacggaagtggaatggaatggagtggaatggaatggaatcgaatgcaatttattggaatagagtggaatggaatggaatggattggaatggaatggagtggagaggta

SEQ ID NO: 926 - DNA, 166 bp, Protomyxzoa rheumatica
tccaatgaactccattccattcaatttcattcctctccattccactccattccactctgctccgtacccattcactccgttccactcctctccactcctcaccagtcaacgcctttcctctccactccacttcattcctcccaattccattacatttcacaccatt

SEQ ID NO: 927 - DNA, 131 bp, Protomyxzoa rheumatica
tagaatggaccaaaatggaatggagtggaatagaaccgataggtatgtaatggattgcaacgtatttcatttgaatggaatggattcaaatgggatgtaatcaaatggattggaatggtatgcaatggaat

SEQ ID NO: 928 - DNA, 178 bp, Protomyxzoa rheumatica
cagaaaacagagaaaaagctctccctatcctttgtatgtatatccaggacatacattctcctttactggaggcagctcaagactcttaccagcccaaagtggcaccagaggaatctacaaacaaaacttatcccattagtttccttgcatatgcagtagttaccttcccacagcctcc

SEQ ID NO: 929 - DNA, 186 bp, Protomyxzoa rheumatica
ccattccattccactccactccactccattccattccatttgattctatcccactccactccaatccactccacagcactccattccattccactccactccattccagtccactccactccactcaactccggtccattccactatactccactccactccaatccactccactccattgcactc

SEQ ID NO: 930 - DNA, 129 bp, Protomyxzoa rheumatica
gagtggaatgaactggaatggaatggagtggagtggagtggagtggtgtgaagtggagtggtgtggaaagcaattgaatgtaatggaatggagtgatgtggagtggagtggagtgagtggagtgtaatg

SEQ ID NO: 931 - DNA, 179 bp, Protomyxzoa rheumatica
ccactccactccactcctttcaattccattccacctctttccattccactgcatttcactccactccactccactttaccgcattctatttgattgcatttgatgcctttcgattcccttccattcaattccttccattccattcaatacaattcaattccattccattcaattccatt

SEQ ID NO: 932 - DNA, 141 bp, Protomyxzoa rheumatica
agtggaatataacggaatggaatggaaggggtggaatggaatggaatggaatggaatcaatcggcgttgaatggaatggaaaggaatggaatggaatcaaaacgagtggaatggaatggaatcaaaaggaatggaatggaa

SEQ ID NO: 933 - DNA, 304 bp, Protomyxzoa rheumatica
aaatttttggaatggaatggactgcaatgcaatggaatagaatggaatcaatggacaggattgtgttgaaattgggtggaatggacaggactgtagtggaatggaagggaaaataatggagcaaaatggaatggtaaggaagggaatggaatggcatggaatggaatggagtggagttgaatggaatggaatggaatcgaatggaaaggactcaaatggaacggactggaatgtaatagactcgaatgaaatggaatcgaatggaatggattcgaatggaatggaatcaaatggaatgtaaacg

SEQ ID NO: 934 - DNA, 162 bp, Protomyxzoa rheumatica
attcgaatggaatggagtcgaatgcaatggaatcgaatgcaatggcttcaaatggaatggaatggtatttaatggaatgcaatggaatggaatgcagccaaatgtaagggactcgaatgtaatagactcaaaaatgatggacacgaatggaaggaacacgca

SEQ ID NO: 935 - DNA, 309 bp, Protomyxzoa rheumatica
gaatggagtggagttcagtggagtagaatggaatggtgtagagtggagtggaatgcaatggaatggaatggaaaggagtggagaggaatggagtggtgtggaatggaatggaatgatatggaatggaatcgaatggtgtgtaaagaaattgtagggaaaagagagaagagatgtggagtggaatggaatggagtgaatgtagtggagtggagtggtttgtaatggagtgtaatggaaaggaaaggataggagtggagtggaaaggagtggaatggaatggaaaggaatggaataaaagggcatggaatg

SEQ ID NO: 936 - DNA, 213 bp, Protomyxzoa rheumatica
tagaaatcgcactatatgtgccgccagcgacgcgcaatcatacttaaagccaaaacaacttaagaaacgcgtagaacggaagtacagcctagcatgtaggcaaaaaactagacgcagtgaagtcccaccgtctcacggcattgcccacaaaaccacaaacccacaaatcgaggtagaaatcgcactatatgtgccgccagcgacgcgcaatca

SEQ ID NO: 937 - DNA, 129 bp, Protomyxzoa rheumatica
cagagggtgtgagccaagcagggacctcacattccctcctgcaatgatgcagaaacccactcacgacacaaatttggtccctctctggaaaagttgtgtaataattattgcagaaacttgtttcttatg

SEQ ID NO: 938 - DNA, 183 bp, Protomyxzoa rheumatica
ttaaattctgttcctgctgtttctgctgccttcattccattccaatccattccattccattcagttccactctcgttgattccattccattccatttcattccattccattcttctcaggctgattccgttccattctattccattccatttcactccattccattccattcctttccactcg

SEQ ID NO: 939 - DNA, 233 bp, Protomyxzoa rheumatica
atggaatggaatggaaaggaatggatttgaatggaatagaatcatatggaatggcgtcgaatggaatggaatggactcgaatggaattgactcgaatgaattacaacagaatggaatggcatcaaggggaatggaaaggaatggaatggacccaaatttaatggacacgaatggaatggaatcaaatagtatgaacacgaaaggaatgatctcaaaaggaatttattcaaata

SEQ ID NO: 940 - DNA, 162 bp, Protomyxzoa rheumatica
gaatagaatggaatggaatggaatggattagaatggaatgacatggagtggactcgaatggaatgtgatgggatggaatggattcgaatggagtggaatggaatggactcaaatggaatagaatggagacaaatataatggaatggaatttgcacaaatgga

SEQ ID NO: 941 - DNA, 132 bp, Protomyxzoa rheumatica
ggaaatcacacaaaataggcacaattgtcatataagcaagtttccaagcatttcttaaatcaaaagcattgttagaactgttgtgtatatctttggaaatgtatcatgtcatgaatacattggatgctattt

SEQ ID NO: 942 - DNA, 153 bp, Protomyxzoa rheumatica
ctccatctcaagaaaaaaaaaaaagtttctcagtaaaataggggacacatttatccacagacccccagtccagagaccatattgggtattttggattggagactttaaaccatgcttacatttgttaagatcctcttgggagtgttcttggta

SEQ ID NO: 943 - DNA, 147 bp, Protomyxzoa rheumatica
aattgaatggaatgctatagtatggaatggaatcgaatggaatgcatacgaatggaatggaccggaatatgatggactggaatagaatggactcgaatgtaatggaatgcaatgtaattgatttgaatggaatggaatcgaatggaa

SEQ ID NO: 944 - DNA, 163 bp, Protomyxzoa rheumatica
gcaaaactgataaaagaggaagcttttttgacttcttctgaaaaattggaatatcaagagtggtttgctttaaggcatacgcttgataagacggagccaattaaaaattcgggagagaaagaaaaaacaggacttcgtccaagagaagttttagcacaggtca

SEQ ID NO: 945 - DNA, 196 bp, Protomyxzoa rheumatica
tcccctccattccattcctttccactccactccactccaatccacttcactccattccactcaccttcattccttttcattccattccattccattccgttccactccactcgattctattccaatgcactccattcccctccattaaattccattccgctcaaactcactccaatccactccactccactccatt

SEQ ID NO: 946 - DNA, 197 bp, Protomyxzoa rheumatica
attaatttcaatccattctattccattccattccattcgatgccattccaattgattgtatgccattcgactccattccattgcattccattccattcgatgctgttccaattgattgtattccattcgactccaatccattccattccatcagattctattccattctattcttttctgttccattccataccatg

SEQ ID NO: 947 - DNA, 261 bp, Protomyxzoa rheumatica
atggaatggagaggatgggagtttagtggaatggaatagattggaatggagtggagtagaatgtaacggaatggaattgagtggagtggaatagaatggaatggattggaatttaatggactggacaagagtggaatggagttgagtagagtgaagtggaattgaatggaatggaatggagcggaatgctgtggagtggacttgagtggaatggaatacagtggagtgaagttgaatggaaaggaatggaatggaatggaa

SEQ ID NO: 948 - DNA, 143 bp, Protomyxzoa rheumatica
ctccattccactccactcctcttaatttcacttaatttcactctactccattgcattcctttccattcccctccactcctctccaatcccctccactccaccgaaatagattccattccacaccactccattccattcaactc

SEQ ID NO: 949 - DNA, 263 bp, Protomyxzoa rheumatica
cattcctctccactacaatacattttactccactccactccattccattccattcctttgcattccactccattccactccactccattcaattccactccttctcattccattccattccaatccattccatccactccattcaattccattccactccacttcactcctatccactccattccactccactccgctccactcctctccattccactccactctctccacttctctccactgcattccattcccttccattc

SEQ ID NO: 950 - DNA, 204 bp, Protomyxzoa rheumatica
tggaatcaaatggaatggaaaaggatagcatctaatagaatccagtggaatgcggtgaattggagtgaaatggtgtgcaatggaatgggatggaaaggaattgaatgcagtggaatggagtggagcggagtagaatggagttcaatagaatgaaatgctaaggaatgcaattgtactgagtggagatgagtgtagcggagtgga

SEQ ID NO: 951 - DNA, 146 bp, Protomyxzoa rheumatica
ttccattcctttccattccattccattccgctccgttactttcctttccattcgaatccatagtattctattccattcgattccattccattccattcccttcaagtccattccatttcattccattccattccattcgagtccgt

SEQ ID NO: 952 - DNA, 184 bp, Protomyxzoa rheumatica
ttccatttaattccattccattctattccattggtgtgcattccattcaattcattagactcagtttcattacagtttattactttaaattccactccattccattcgagtctattaggttccattcgattccattccattccattccattgttttgagtccattctatcccatcccattctat

SEQ ID NO: 953 - DNA, 379 bp, Protomyxzoa rheumatica
attccattccactccactccattccactcctctccattccgttccactccattcctctccactccactgcattctgctcgactccattcctttccactctactccattcctctccagtccactctactccttttcattccactccactccactctactccagtccccaccattctactcgactgcattccattccattccacactattccattccactccacttaattccattccactgcactgcactccattcaactaaattccactgcattcaactccattccattccattccactccactccactaatttgcgatcttctgcactccacttcactccagtcctctccattctactcccctccgatccactccatcc

SEQ ID NO: 954 - DNA, 357 bp, Protomyxzoa rheumatica
ggaaaggagaggaatggaacagagtggaatggagttgagtggagtgggatagattggagtgtaatggagtttagtggagaggaatggaatagagtggaatggagttgaatagattggaatggaatggaatgcaatcgaatggattggaatggaatggaatggaatggaaatgagtggagtggagtgaaatggaatgcagttcaatggaggggagagaaatggaaaggaatggaatggaatgaggcggtgtgaaatgaaatgcagtggaattgaatagagtggaatggaatggattggaggggattggaatggaatggagttgaatggaatatagtgtaatggaatgcagtggaatag

SEQ ID NO: 955 - DNA, 599 bp, Protomyxzoa rheumatica
cattccattccactccactcaattccattccattccattcaactccattccattccactaaacttccagcctctccattccattccattccattgaattcaattccatttcattccattcctgtcccctccattccattcaacactgcaccactcctctccattgcattccatgccattcctttccactcaattccacacgactccattccattccattcctttccactccacacctttccactccattccattccagtcccatccactcgactcctctacactccacttcactccactccactcaattccactcaatttctttcccctccattacattcaaatccattccatgccattccattcccctccattccattccaatccattcccgtccgttccattccgatccattcccttccactcacctccactccactccaatgcattccattccaatttattccattccactccactcaattacattccactccactacacttagttccattcctttttatttcattccatttcattccattgcattccattccactacacaccgttatattacattccactctattccactgcatt

SEQ ID NO: 956 - DNA, 136 bp, Protomyxzoa rheumatica
ccatgtgtctgcaaaatctgaatatgcttttgtgttgagaaaataataactactatgaaagattttgatataattttagagtcaaaatatcaaaacactgtgcctgtaatgggtgcccttgttgtcagtgcttaaa

SEQ ID NO: 957 - DNA, 188 bp, Protomyxzoa rheumatica
tggagtggaatggaatggaatggagtggaatggattggaaaggaatggatagtagtggactggagtgtaacggaattaaatggagtagcgtgaagttgaaaaaaatggaatggaatggagttgaatgcaatggaatgcaatggagtgcaatggaaaggagtggagtggaatggaatggagtggagtgg

SEQ ID NO: 958 - DNA, 454 bp, Protomyxzoa rheumatica
attccattccattccactccattccattccattccactcgatcccactccacttcactccattccattccattccactccattcaattccattacagtccattccattccactccaaataactccgttccactctaatctatgtcacttctctcagctcctttacaatccattctattccaatgattaccattgcactccactcttttccactccattctactccaattcattccattcctcaagaatccattgcattccattccactactctccatttcactccattgcattccactccgctccaatccattccgctcctttccattccaatccactccattccactccattgccttcctctccattccatgccattcctttcaattccattcaatttcatccgactccattccatgccattcttttacggtccattcctctctgctccactc

SEQ ID NO: 959 - DNA, 202 bp, Protomyxzoa rheumatica
gaatggaatggaatggaatggaatgaaaaggagtgggaaggaatggagtgaagtggatttgaatggaattgagtggagtggaatggtatggaatgaaatgggatggagtgaagtagagtggggttgagtgaaatggaattgaatggaatgttatggaatttaatggaattggttggaatggaatggaatggaatggaataga

SEQ ID NO: 960 - DNA, 176 bp, Protomyxzoa rheumatica
cttccaccctcctttgcttctttcttgtcttatgggattcattaaattatttttctttcatttttttttctatttctataattctcactaaattttaaaaaaatcacatgtaaactttattttttgctgtttagaggaaatcagtatgtttagttcctctgaagatgacaagaagc

SEQ ID NO: 961 - DNA, 315 bp, Protomyxzoa rheumatica
ttatcaaatggaatgtaatggaaaggattggattcaaatggaatggacaggaatggaatggactcgaatgaaatggactagagtggaatggaaacgaatggaagggaaacgaatgaaatgcaatggaatggaatgcactggaatggaaacgaaaggaatagaatggaatggaatcagatgcaactgattggaagggaatggagtcaattggaatagaatcaaatccaatggtaacgcatggtgtggaatggaaaggactcgaatggaatggacgcgaatggaatggcatcgaatggaatggaatggagtgaactg

SEQ ID NO: 962 - DNA, 152 bp, Protomyxzoa rheumatica
cattacataccattctatgattccattcaattccattcgatgttgattccatttgattccattcaattattctatttgactctattcgatgatgattccattcgattccattcaatgatgccagttgattacatttgatgatgattctattc

SEQ ID NO: 963 - DNA, 219 bp, Protomyxzoa rheumatica
ggaatggaatggaatggaatggatttgaaaagaatggactcgaatggtctccaatagaatggaatcaaaaggaatgcaattgaatggaatggaatcaaatggaatgaaatcgaatggagtagaatggaatggactcgaattgaatgcactctaaaaaaatgcaatagaaagaatgcaatggaaaggaaaggaaaggaatggaagagaatggaatggaag

SEQ ID NO: 964 - DNA, 185 bp, Protomyxzoa rheumatica
aaggtggatttccacttcttgcctatgagtcttcccgccgtatctggtggtgcgatctgacgatacttgatccgtctcagcgcactgcgggatacgagcgaataaaaatgcttaagacttggctctgtcgcagcgtgcctgttttggagcgagagctcccggatctaccagccgggcccatcgtg

SEQ ID NO: 965 - DNA, 196 bp, Protomyxzoa rheumatica
agctccgcgcgctcggtcgcgctgaagccacccgaggcccagccgaaggaatgcatcatctgcatcatctaccacgatcggcgcgacccagaccttatctcttatgcggtctcggaaattggcagcctgaaaagcatgggtctgtcgtgcaagcggactcggaacgatttcctggaggagctgatctcgccgagat

SEQ ID NO: 966 - DNA, 203 bp, Protomyxzoa rheumatica
atggaaaggaatggaatggaatggaatggaatcgaatgaaatggaattgaatggaatggaattgaaggaatggaatcgaatggaatggaatcaaaatggaatcgaaaggaatgtggtaaagtggattggagtgtacaggagttgaaaggagtgcaaaggaatggggttgaatggaattgaaaggagtgcggtggagtggagtg

SEQ ID NO: 967 - DNA, 178 bp, Protomyxzoa rheumatica
gtggaatggaatggaatgaaatggaatggaatggaatcgaatgtaatcgattggaatcaaatggaaaataaagaatctaatagaatcgaatggaatagaatggaattgaatggaatcaaacggaattgaagggaatcaaatcgaaaggaaacgaatggcatcgtattgaatggaaagg

SEQ ID NO: 968 - DNA, 152 bp, Protomyxzoa rheumatica
tccactcctctccactgagatccatttctttccgttccattccctttcgttccattccactccatttcatttcactgcactccagtccatccctctccatttcactccattcgactccattccccttcaatccactccactgcacttcacta

SEQ ID NO: 969 - DNA, 226 bp, Protomyxzoa rheumatica
ccattccattccattccattagattccattccattagagtgcattccattaaattccattccattcaattcgagtccattccatttcaatctagttcattcctttccattcccttcaagtgcattccattccattcttttctattcaaatccactccaatccattccactcatctccattccaaaacattccattccattccattccattgcattccattctattc

SEQ ID NO: 970 - DNA, 235 bp, Protomyxzoa rheumatica
gtagaaagtgtgatattcgcgcgaacagatactgccgaaatcacctgatgccatttattttccaccatccatcagacttcgaattcatcgaaacagacggagaatcgaccgtccttgccttcattggcgacaccccggatatcccggcttcttacttcgcctccgccaccctctccccatatgacgaaggtgtaagcgaatacagtttcgcgatttctgagagagccggggatga

SEQ ID NO: 971 - DNA, 186 bp, Protomyxzoa rheumatica
ggaatggaatggactcgaatggaatgggattgactcaaaaggaatggaatggaaaggaatggactcgaatggaatgcaatggaatggatctaagtggtatggaaaggaatggacatgaatggaatggaaaagaatagacggtaatggaaaagaaaggattgaaaaggaatggaatgtaatggactc

SEQ ID NO: 972 - DNA, 336 bp, Protomyxzoa rheumatica
tccattccattccattccgttccagttgattcaattccattctattcctttccattcaatttcattcgattccattcgattccattccactccattccaatctgttccattccaatgcattcctttccattccatgccatgccactgaggttgattcaattccattctattccattccatggcattccattccattccagttgattcaattccattatattccattccatgccattcctttccattccattccatgccattcctttccattccattccattccagttgaatcctttccattccattccattccattccattccattccacactggt

SEQ ID NO: 973 - DNA, 144 bp, Protomyxzoa rheumatica
tccattccatgccattccattcgattctattctattctactccattccattccattcggttccatctgattccattccaaactattcctttccattccatttgtttcgattccattcgactccattctactccagtgcattcca

SEQ ID NO: 974 - DNA, 150 bp, Protomyxzoa rheumatica
actccattccattccaatccattccattctactcgcggtgattccattccattttattccattccattcaattccattcctttccttcaaattccattcccttccattccattcaactccattcctttccattccattccatcccattcc

SEQ ID NO: 975 - DNA, 127 bp, Protomyxzoa rheumatica
ccattcgattctattcctctatattctgtgcagttccattccattgcattccgttctgttccattccatggtattccattccattccgtttgatttcattacattcgattccattcctttcaactca

SEQ ID NO: 976 - DNA, 162 bp, Protomyxzoa rheumatica
tccattccattccattccattcctgtcctttcaattcgattccattctcttcgagtccattcgattcaattccattcttgttcattccattccacttcattccattcgactctattctattcttttccattcggttctattccactctattccattcgagtc

SEQ ID NO: 977 - DNA, 143 bp, Protomyxzoa rheumatica
gaatggaatggacacgaatggaatggaatggaatgaaatgaactcgaatggaatggaatgcaatggaccttaaaggaatggaatggaatggaatggaaaggagtcaaatggaattgaatataatggactggagtggaatggaa

SEQ ID NO: 978 - DNA, 128 bp, Protomyxzoa rheumatica
tgtactcctctccacacttctctacacctttctgttcctttcctttctgttctgatcctttccattccattccactccattctattacactccactccactccacttcattccatttcactccattcc

SEQ ID NO: 979 - DNA, 126 bp, Protomyxzoa rheumatica
gtgtgcgtatatgtctatgtgtgtgtctgtgtgtgtgtctgtgtgtatctgtgtgtatgtttgtgtgtatgtctgtgtgtctgtgtctgtgtgtgtatatgtctatgtgtgtgtgtgtctgtgtgt

SEQ ID NO: 980 - DNA, 142 bp, Protomyxzoa rheumatica
taatgggatggaatggactataatagaatggaatggaattaaatggtctcaatagaaatggaatcaaaagcaacggaatggattcgaattcaatggaatggaattgactcgaatggaattgaattgaatggactcgaatgaa

SEQ ID NO: 981 - DNA, 169 bp, Protomyxzoa rheumatica
gattggactcaaaaggaatggactcaaatggaattgagtcaaatataacggaatggaatgcaatggaacggaatggaatggaatggaatcaaatgccaaggaatcaaatgcaatggaatcgaatggaacggaatcaaatagaatgggattgaatggaatggaatcgaat

SEQ ID NO: 982 - DNA, 164 bp, Protomyxzoa rheumatica
tggaaggcaatcgaaaggaatggaattgaatggcaatgaacggaatcaaatggaatgtgatgaagtggagtggaatggattgtcatggggtgcaatggaatggggtggaaataaattgaatggagtggggttgagtggagtggaatggagtggaatagaatgga

SEQ ID NO: 983 - DNA, 124 bp, Protomyxzoa rheumatica
aggagtggagtggaaaagaatagagtataatggaatggaatggaacggaacttaaaggaagtagtggaatggagtggattagagtggagttgactagactggatcagcatgcattggaatggaa

SEQ ID NO: 984 - DNA, 266 bp, Protomyxzoa rheumatica
gttccgtttaattccattcgagtcattcgcattcaaatgcattcaagtgcattccattgcattccattccactgaagtccattagtttccattcaactcgagtcctttccgttgcattccgttccattcctttcgagtccattccattccattaaattccattcgagtcttttccattccgttccattcgagttttttccattgcattccatttcattcgagtccactccgttctattccattcgagtacgttccgttccattcca

SEQ ID NO: 985 - DNA, 172 bp, Protomyxzoa rheumatica
tggaatcgaacggaatggaatcgaatggaatgaaattaaatggaatagactggaattgaatggaattcactagaatgaaacgcactggaatggaatggattcaaatgaaatggactcgaatggcatggattcgaatggaatggattcatattaaatggaatggaatcgaatg

SEQ ID NO: 986 - DNA, 140 bp, Protomyxzoa rheumatica
ttacctatgtgagatgaatcaacatatcataaagcagatgcacaaatagtttctttctcatttttatttggagatattaagtttttccccattgccctcaatgggctttcacattttttcacaggttctccaaaaagagt

SEQ ID NO: 987 - DNA, 161 bp, Protomyxzoa rheumatica
ctagtggaatggaatggagtggaacagaatggaatggaatggaatccaccagagtggaatttaatgaaatggtatggaataaaatggaatggaagtgaataaacgcgagtggaatggattggaatggaatggaaggaatggaatggaatggaatggaatag

SEQ ID NO: 988 - DNA, 159 bp, Protomyxzoa rheumatica
tatgaggctaattttactgctcaactcactcaaagctattgggtacgactatccgacccggccgctctgagcgcgcaacagcgagagatccttaaggacataactaattgtggcgtagaccactggaccgacgttgtcgcgacactccagaatgcccca

SEQ ID NO: 989 - DNA, 216 bp, Protomyxzoa rheumatica
attgcttccgctgaaagtccattgaagccgcggccactcggtgtcgctcgcagcagtaggcggccgatcgataccccaaacgagctaaggatgtcctgctgggttgagttctggatgctcaggttcttgaacttagcgctatccctccagacgaattctacgcgttctcccaggagcggcttcggtgctaatcctagctttctagcgagagcaaaa

SEQ ID NO: 990 - DNA, 257 bp, Protomyxzoa rheumatica
tccattccattccattgcataccaatttatatacctccactccattccattccactcaaatccgttccattccattccactccactctaatacactgcattccattccgctccactccattccattccattccacaccattccattccactcaactccattccattccaccatattccccttctcccaagtcgattccattccatttccttccattccattaaactcaaatccgttccattccattccactccactc

SEQ ID NO: 991 - DNA, 132 bp, Protomyxzoa rheumatica
aaatgggtgcattggagttcaacaacttccaactaatatcctttctctcaatctcttatcaacacacaatttttctttttatttcattaattaacaaagagaaaccaaataaaaagagaaagtagctgagtt

SEQ ID NO: 992 - DNA, 257 bp, Protomyxzoa rheumatica
tcactccattccactccactccacttcactccactcctcttgactccattcctttaaaatcaattccattgcaatccactccattccattcccttccactccattccacttcattcctctccacttcactccaatccattccattgcattcctttccattccattctattcaattccattcctctcctttccattccgctacactccactccattcaattccattccgctccactccattccattccacttcactcc

SEQ ID NO: 993 - DNA, 123 bp, Protomyxzoa rheumatica
atatattgacagaaggctcaattcactaggaaagtgtaataattctaaacatttttattcttattaacatagcttcaacatatataaaacaaaaatagataaaattataaaaatattggtaaa

SEQ ID NO: 994 - DNA, 191 bp, Protomyxzoa rheumatica
aattgaatggaatagaatggattcgaatggaatgacatggagtggacacgaatggaatgagatgggatggaacggacacgaatacattggaatggaatggactcaaatggattagaatggcatggacacaaatggaatggattggaatggcatggacaagaatggagtagaatggaatggacttgaatgga

SEQ ID NO: 995 - DNA, 137 bp, Protomyxzoa rheumatica
attattaaagttaaaaatatttaaaaatgttttattaagggtaaaaataattttagtataataatagatataatcaagaatacaaaaggaaattcaagaaagaagttgcctccctaaggaaaacaggatgaggtgga

SEQ ID NO: 996 - DNA, 225 bp, Protomyxzoa rheumatica
aatgatgtaataaatgctgtcttcaagaacatcctgactattaataccattaagtattacagtgcagcttcctcttatgttatcaggaaagttcaatgtgacagtttccattcacatgtcagtaaagaagcctacaatgtatccaaatcgttgcccaagtacaaatgatccaatctgacaaatgttttgacagcctgagtaaaatgttttcagtaaaaaataatg

SEQ ID NO: 997 - DNA, 253 bp, Protomyxzoa rheumatica
tggagtggaatggaatgcagtggaatggaatggagtgaagtggattggaacggaatggagtggaattgaatagattagaaaggagaggaacggagtgtagtggagtggaactgaatggaatggaatggaatgaaaagggaaggaatggaatgcagtggagtggagtggaatggaattaacgggagtggaataaaatgcaatggaatggaaagcaatggagtggaatggagtggagtggagtggatgggaatgg

SEQ ID NO: 998 - DNA, 235 bp, Protomyxzoa rheumatica
cgaatttaatggaatggaatggaatggactcgaatggaatgaaattgaatgcaatagaatggaatggaatgacatcgaaagaaatggaatggaatggaatggaattgaatggacccatatataatggacttgaaaggaagggactcaaatagaatggattggaaagtaatggtctcgaatggaattcatgccaatagaatggaatagaatggactgcaatagtatggaatggaat

SEQ ID NO: 999 - DNA, 181 bp, Protomyxzoa rheumatica
cattccattccattccactcgagttgattctattccattccattcctttcgggtccattccatttcatttgagtccgttcattccattccattccttttgggtacattcaattgaactgcattacattcgagtccattccatccattttatgccattccattccatcgagtccattccatg

SEQ ID NO: 1000 - DNA, 138 bp, Protomyxzoa rheumatica
tactttaaaaatttcttctttttcaataataaattaaccttagcttactgtttacttttttactttataagctttttaatttttctttctttttttttgttttttttctttgagatagtctcactctgttgcccaggc

SEQ ID NO: 1001 - DNA, 334 bp, Protomyxzoa rheumatica
ttgcattccattcctttccattccattccattcccttccattccacctgtgttgattccatttccattccacccgattacattggcttccattccactcggaattattccattccattccattcccttccattcccttccattgcattccattccaatccgttccattccattccattccactcgagttgattccgttccattccattccattcctttcctttccattacattccttgcgggttgattttattcaattcctttaccctccattccattctattcaattccatacaattccattccattccattccattccattccattccattc

SEQ ID NO: 1002 - DNA, 748 bp, Protomyxzoa rheumatica
ccattccattccattccattcctttcagttccattccatttcattccttttggttcaattcgaatccattgcattcctttctgtgccatgccattcctttcgtttccattccattccattcctttacattacattatattcgattccattgcatttgattccatctcttgccattccattacattcgattccactactttccattccattgcagtccgtttcattccattcctttcgagtacattccattccattccatgccatgacattccattcacttccattccatttcattccattccgttccatttgaatccattccattccattcaaatcgtttccattcctttccattccattctgttctattccattccctttgagtccattccatttgagtccattccgtcacattccattccattccattccattccatttgattcaattcaatttgatatcattccactcgattccaatccattcaattccattccattcgtgtacattcctttcgagtccgttacattccactccataccaatccattcaattcctttccattccattccattccattgaatttctttcagttcaattaaattccatttgattccattgcagtcgcttctattccatttgactccattccaattcagtcgattatgttcgagtcgattgcatacaattccattcaattccattccgtttcattacattcgagtcttcccattccattcgagaaaat

SEQ ID NO: 1003 - DNA, 155 bp, Protomyxzoa rheumatica
ttccattcaattccattccattgggttccattcaattggactccaatccattcgagtccattcctttccattcccttccattccgttccgctcgattccaatccattcgattccattttattccagtccattccattggattccatttcattcca

SEQ ID NO: 1004 - DNA, 161 bp, Protomyxzoa rheumatica
ggatggaatggaatggagtggagtggagtggagtggagtgaattgcggtggaatggatttgctggattggagtggaatagagtggagtggaatggaatggaatggaatggaggggagtagagtggagtggaggggaatggagtggaatggaatggaatgga

SEQ ID NO: 1005 - DNA, 374 bp, Protomyxzoa rheumatica
gaatgcaatggaatggagtggagtggaatggaatggaatgcaaaggaatggactggaacggagtggagtggagtggaatgtaatggagacgattggggtagaaaggaacggaatggaatggagtggagtggaatggagttgagtggattgcaatggaaaggaatggaatggagtgatatggaatggtgaggaagggagtggattggaaaggaatggagagcaacgaattggagtggagtggattggaatggaatgtagaggaactgaacggaaaggagtggattgaaatggaatggaatggaacagaatggaaaggaacataaagaaatggaatggaatgcaatggagtggggtggaggggaatggaattgagt

SEQ ID NO: 1006 - DNA, 193 bp, Protomyxzoa rheumatica
aatggagtggaatggaatggaatggaatggaatggaatggtgtggagtggaatggaatgcaatggaatgcagtggaatggaatggaatggattggagtgaaatggaatggagtggagtggaacagaatggagggcagtgaagtggaaattaaaggaatggaatggaatggaaaggaatggaatggaatggagt

SEQ ID NO: 1007 - DNA, 124 bp, Protomyxzoa rheumatica
gtgtattcttctcacagaattgaaacttcctttacacaaagcagatttgatacactccttttgtggaatttggtggtggagatttcatgcgctttgtggtccatggtacaaaaggaaatatcgt

SEQ ID NO: 1008 - DNA, 227 bp, Protomyxzoa rheumatica
gagcggaatgaagtggaatgcagtggaatggaatggagtggaatgaaaaggaaaggaatgaaatgggatggagtggagtggaatggagtagaactgaatggagtggagtggaatggagtagaagagaatggaatggagtggagtggaatagaatggagtggaatggagtggaattgagtgaaataatgtggaatggaatgtggtggagtggaatggaattgagtgga

SEQ ID NO: 1009 - DNA, 140 bp, Protomyxzoa rheumatica
gttttaacactactacttggggttcgtaaattaatacaaaatcctggaataaaaccatttatcatcttatatccaaccaaacaaattaatataaacactgttaaaaaataagaaatgaaatttaaattaatgatagaaat

SEQ ID NO: 1010 - DNA, 128 bp, Protomyxzoa rheumatica
cattcccttgccttccattaccttcctttcccttccatttcattccactccactacagtccgctccactatatttctttcctctccatatcactccattccactccattccattgctttccattccac

SEQ ID NO: 1011 - DNA, 273 bp, Protomyxzoa rheumatica
cgaaaggaatggaatcaaatggaatggaaccaaatggaatggaatctaaaggcatggaatgaaatcgaatggaatgcggttatgtggagtgaagtggaatggaatggggtggaatggaattgaatgtggtggagtggagtggagtgtaatggagtggaatggaatggaattgtgtggagtggagcagattggagtggaatgcagtggcatggaaagttatggaatggaatggaatggaatggagtagacaggagtggaatgatatggaaagga

SEQ ID NO: 1012 - DNA, 154 bp, Protomyxzoa rheumatica
aacatgtgaacaccctaacactccaccaatctagaaatcagaataagcaaacctggacctagaataaacttgagacgtggatctggggctgcagagagaagccaagtcgggctctgcaaaccctggcatttgactgtgtgggcagagcagcttc

SEQ ID NO: 1013 - DNA, 133 bp, Protomyxzoa rheumatica
attgcattctattcaattcaagtccattccattccataccattcggttctgttccattaaatcccattccattccattcccctcttgtccattccattccactacattcgggtccattctattatattccctt

SEQ ID NO: 1014 - DNA, 123 bp, Protomyxzoa rheumatica
aatgatgtcgattggaatggaatggaaaaaaatggaccagaatggaatgaaatgggattgaatggaacagaattgaaagtcatttagactcgaacggagtgtaatggaatggactctaatgga

SEQ ID NO: 1015 - DNA, 132 bp, Protomyxzoa rheumatica
tgtgcaccaccatgtttggcttatttttttgcatttttggtagagatgagattttgttgtggaatgaggagtcccagagaggtcttggggtacaggaagatttttactgagtgcactcagactcagtggact

SEQ ID NO: 1016 - DNA, 179 bp, Protomyxzoa rheumatica
atcttgtgtgtgtgtgtgcctatgtatcccgacgtctctgcacatgtgagcatgtgtgttcacgcctgtgtctatccgtgtacgtatgtgtatagatgcctctgcgtatatacacgcaagcatacaggcacactagaaacgcctaggcatacacgtgcgcacacagacacgtgcgtgta

SEQ ID NO: 1017 - DNA, 153 bp, Protomyxzoa rheumatica
caaatgtcatacattctttccttgttatgtgtctatgtctatttatatattccctggctctgtccactatgcaggccccttaacaataagcatacctaatgcccagatcttggtgtctaagtatcattctccaccaaaaaggctccttgtaga

SEQ ID NO: 1018 - DNA, 127 bp, Protomyxzoa rheumatica
tgaagcatcaaatggaattgaatggaatcatcatcgaatggagttgaatggaatcatcatcgaatggaatcgaatgaaatcttcattgaatggagtcgaatggaatcatcatcgaatggaatctaat

SEQ ID NO: 1019 - DNA, 182 bp, Protomyxzoa rheumatica
gggagggcccagggggccaaggggtggagctggaagtgggagctgagcctacatagcttacttcagcaggcaaggttacatcacaatccctgccagtcagcatcaatgcacaacacttggctgaggatggcaataacaatgatgataatggtgacaaagatgatgatggtgatgatgatgat

SEQ ID NO: 1020 - DNA, 277 bp, Protomyxzoa rheumatica
agtggagggacagtctgaaacagagtaataaattgatatgcactttttaaaaaaaagtgatttattatttattgttccctgtcttactagaagtcactggttgatattagttgccaaagttttaagatcatttagtttaatttaaaatgacttacactcattgtttttcataccatttcagttcatcacaattgttctagctttttaatggcagttctattgaacaagtaaaaactcaaaatagattaaaaaatttttttaaaataaattatacata

SEQ ID NO: 1021 - DNA, 158 bp, Protomyxzoa rheumatica
ggacttccgtcttttttttttcatgctttaaataaagaattgacgatattgttttgatgtgttaatatcctggtttcttctaaatacattttcttctcttcctttcatgaaaatgatcagatttgaccatgttgcatccttagcaggtatgcaggaag

SEQ ID NO: 1022 - DNA, 165 bp, Protomyxzoa rheumatica
gcctgaaagataaaacctttttcagtttcatagtgtgattaaaagaaattttatagactaacacttggtcagaaggcaacacggaaagatgtgtagcaaattagtgaaggcttgagtcctacaggccgcacaggtacttgttttaaatcccagaattcagtaact

SEQ ID NO: 1023 - DNA, 245 bp, Protomyxzoa rheumatica
actccattccattccattccgttgcactccactccattcctctccactccagtcacttccactccactccactcatttccagtccactccattcctctctattccattgcattccattccactccagtgtaatgcactacattagtctccacttcactccattccattccatttcattccattccattatattccattccaccccattccattccataaagttccactcctttccattgcactcc

SEQ ID NO: 1024 - DNA, 130 bp, Protomyxzoa rheumatica
cgtagtggtaatgcaaagggttggttcccttgtgccccggatttcaattctcctttgggacggagagacattcgggataggagaggatcggatgttctagagtctctaaaatcgcctaattataacaatc

SEQ ID NO: 1025 - DNA, 141 bp, Protomyxzoa rheumatica
aaccaagtcgcctttgcatgcggagatctagatgtcgtatgcaaaacacaagaagcaattgatccgggttgtcgcggcgacttgtgtaagtctgtcagacctgtggaccagtatgctgggaaaacggtcgacaatgttgtg

SEQ ID NO: 1026 - DNA, 365 bp, Protomyxzoa rheumatica
tcacaccttttactttttcatctactgaaacctagatggtgctgtcaaaagatgagatgagctagggtcatgggtcattatgttgcagaaagccacgacagaccaggagcacttgtctcagcctgttatgagttaaaaataaactaccaatgaattaatatatttatttgctacaaccattagttttttcccaaatagtacagatattagtaccttgaagtcaagtcttcttattataacaaaaccaaaaaatatgttacactggcttaacattttgtgttaaggagaaaacaggtgttggaggttagaaatatagagaccctattataagaaatcaaaacctttaacaaattaccttctgttct

SEQ ID NO: 1027 - DNA, 124 bp, Protomyxzoa rheumatica
ctttctaatacattccattccatttggatccattctgttccatttcatttgggtccattccactataatcgatttttttccagtccactccattctactgcatccacttgagtcaattccattc

SEQ ID NO: 1028 - DNA, 319 bp, Protomyxzoa rheumatica
tccattccatttgaatccattaaactccattctattcgagtccattccattccattcgagtccttccattccattcctctcgtgttcattgcattccattcaagtcctttccattccacttcattccagttcattcctttccattgcattgtattccatttaagtccattccattccagtccattccatttcactctattccattccattcgtgtccattccattccattccattcgagcccattcctttccattatattccattcgaatctaatccattccgttccctttattccattccattccattccattccatt

SEQ ID NO: 1029 - DNA, 126 bp, Protomyxzoa rheumatica
atggaatggagtggaatggaatggaacggagtgggatggagtggcgtgtatgtgaatgcaataaaatggagtggaatagaaagaaatggaatggaaatgaatggaatctaaaggagtggatgggca

SEQ ID NO: 1030 - DNA, 145 bp, Protomyxzoa rheumatica
ctaggctctgcctacagtggtattgtgacataaagctgcgctgatctcccaggtgattcaactcttttcaatgatctgcttacagggagtattgtgaactatgactgcacttatcaacaaggtggtgtaactcttgtctaggctc

SEQ ID NO: 1031 - DNA, 150 bp, Protomyxzoa rheumatica
acacaaaatatatattatataatttacataaaaaatcagtgtacacaaaatacatataaaatgtacaaaaaatatcaaactacagaaaatacatattacatactgtaagtaaaatatcaaagtatgccaaattcatattatatactgtac

SEQ ID NO: 1032 - DNA, 160 bp, Protomyxzoa rheumatica
ggcatgcagtggaattcgttggaatggaatagactcaaatggaatggacacgactggaatggaatcaaatgaaatggaatcgaatggaatgaaatccaaaggaatggaatcaaaaggaagagaatcaaatggaaccgaatcgaatggaatggacgggaat

SEQ ID NO: 1033 - DNA, 167 bp, Protomyxzoa rheumatica
ccattccattccattccattccattccactccattccaatattttccattccattccatttgattccattcctttccactcgggttcactcaatttcattcctttccattccttagcattccattccattatattccattccattcaactgtggttgattccattcc

SEQ ID NO: 1034 - DNA, 158 bp, Protomyxzoa rheumatica
ctccattccactccaatcacttccatttcactgcactctgatccactccaatcaactccactccattccaatcaactccactccactccattcatgtccattccactccgttttttcccttccgttccattgtgttccactccgttccattccactcc

SEQ ID NO: 1035 - DNA, 188 bp, Protomyxzoa rheumatica
cattccacactctccactcctttccacatcattccattctactacactcctttccactccattccattcctctccactccactttactccactccacaccattccattccataacattgcttgccataccattcctttccattcctttcaactcactccattccagtctgctccaatatggtccactc

SEQ ID NO: 1036 - DNA, 263 bp, Protomyxzoa rheumatica
agtagagtggagtagagagaagcagagtgaaatggagtgcagcggagttaaaaggagttgaatgtaatggagtggaatggaatgtagtgaactgcaatggaatggagtggaatggagaatactggagtgaaatcgaatggagtatagtggaatggaatagaaaggaattatgtagaaatttatggaacggaatggaaaagaatggcatggaatggaatggagtgaaatggagtggaaaggagtggagtggaatggaatggaga

SEQ ID NO: 1037 - DNA, 145 bp, Protomyxzoa rheumatica
gactcgaatggaaagcactataaaggaaaggtctcgaatggaaagcaataaaagaaaatggaattgattgtaatggaatcgaatggaatggaattgaatggaatagactggagtggaatggactcgaatggaatggaatggaatg

SEQ ID NO: 1038 - DNA, 127 bp, Protomyxzoa rheumatica
ttcgatttaattccattcagatccattccattcatttcgattcaattcgattccattctgttcaagaccgttccattctattccattactttcaattccattccattccattttattcgattccatt

SEQ ID NO: 1039 - DNA, 155 bp, Protomyxzoa rheumatica
tccactccattccactccattacattccactccactccactccattccacaccactccattccattccactccattgcactgctttcatttccactccactccattccattccactgttctctattccactccgttacattccgctccactacag

SEQ ID NO: 1040 - DNA, 193 bp, Protomyxzoa rheumatica
ccaccgcactccactcgactccactccactctgctccactccactccactccattccattccattcttttccattctattccactccaaacaattcctttccacttaacaccactgcattccattccattccattcctttccactcttttcaattccactcctttcctttcaattccattacactcgattcca

SEQ ID NO: 1041 - DNA, 146 bp, Protomyxzoa rheumatica
ccactccactccactcaacaacactgcattccattccactgcagtccagtgaattccattccattccccttgactccacttcactccagtccactccactccattccactccacttcacttcactacattccattccactccattc

SEQ ID NO: 1042 - DNA, 157 bp, Protomyxzoa rheumatica
gccatgacagcttcatgggtccaggcaaatcacggcacctctctatgcttcatttttttattcctcacacagtggaatgacattaacctcagtgcttacctaagagaggagaaatgattcctctgccttctccctatttctacatttgccagagcat

SEQ ID NO: 1043 - DNA, 130 bp, Protomyxzoa rheumatica
agttcagccctgacaagatttccagtgacatacccattttcctcttccacgtctgccagcagtgacttgaccactgacatggagagcatctcctcacttccagccatcactagtacactccacacaacag

SEQ ID NO: 1044 - DNA, 213 bp, Protomyxzoa rheumatica
acggaatggagtggaatggaatggaattgagtcaaatggaaaataatcgaatggaatggcaccgactagaatgtaatggaatggaatgaaatggaatagaatggaatgcaatggaatggagtggaattgagtggtatgaaatcgaatggaatggagtcgaatggaatggagtggaacaaaaatggaatcgaatgtattggaaatgaactgaat

SEQ ID NO: 1045 - DNA, 143 bp, Protomyxzoa rheumatica
cacaccacatatcccaaacacacatatccaccacacataatgcatcccacacacatatacacatcacatgaacacaccatacatacacaccgcatatcccatgcacatatacacactgcacaccacacatcccatacacatat

SEQ ID NO: 1046 - DNA, 136 bp, Protomyxzoa rheumatica
ctaatcgaatcgaatggaatcatcatcaaatgtaatcaaatggaatcatcaaatgggactcgcatggaatcatcattgtatggaatcgaatggaatcatctaatgaaatcgaatggaatcatctgcgaatggaatc

SEQ ID NO: 1047 - DNA, 148 bp, Protomyxzoa rheumatica
cctgcccgtgcggatcggggaagaagtacaagcggtgttgcgggatggggtgactacgtttccggcactgagacctttgcaaagtgcgggccgccaacatagaaacagccgcaatatcggctcatcaatcaaggacaggtcgcagaat

SEQ ID NO: 1048 - DNA, 132 bp, Protomyxzoa rheumatica
cactcgaatggaatagaatggaatggagttgaattgaatgcagtggaatttaatggacttgaatggaatggagtagaatggtctagaatggaatggaattgaaaggatacgaatggaatggaatgtaatgga

SEQ ID NO: 1049 - DNA, 297 bp, Protomyxzoa rheumatica
ggaaagggccatgcctgaactgttttagagagatgactatctatgctgttctcaatgatctcccaaaaggaggtgccataaacatcagtaaatcactttttgtgtccttctagatctgtcttatgattttattttcataagtgatttatctggatgattactatggagttagaggaagattaagaatgaaatcaaatattcattattaccagtatgtatttccaatatcagtatttattgagctcttgtggctctgagcatacttcttttctttcataaccagctaaaattgtgctt

SEQ ID NO: 1050 - DNA, 177 bp, Protomyxzoa rheumatica
tggtcttgtttgtagtgatacaagaagtgaagctgggagtactctgtggtatggtctccgtggtaatgatagaagaagtgaagctgggagtactctgtgaggtgttcttggtggtggcaatcgaaaaagtgtagctgggagtattgtgtgaagtggtctcggtggtggtgatcaaag

SEQ ID NO: 1051 - DNA, 256 bp, Protomyxzoa rheumatica
gtggagtagagtggagtgaagtgtaagggagtggagtggaatggaaaggaactgagtggaatggagtggattggaattgaatggagtggagtagaggggaatggagtggagtgaagtggagtggagtggattggagtcaagtggaagagaattgagatgagggaagttgaataaaatagaaaggagtggaatggagaggaatggaaaggagtggaatggagaggaatttagaggactggagtggagtggattagag

SEQ ID NO: 1052 - DNA, 155 bp, Protomyxzoa rheumatica
catcccattcaagaccattccattcaagttctgtccattcgagtccattccattacattccatttgatatctttctaatacactccattccattctattgcttttgattccattctattccattccattctattgcttttgattccattcaattc

SEQ ID NO: 1053 - DNA, 233 bp, Protomyxzoa rheumatica
tattccattccaatccattccattccattccattccattcaactcggattgattcaattccattctattccattccattccattcaactacattccattcccctcttttagattccatgacattccattccattccattccaatctcttccactcgggttgattccattccattccatgcctttagaatacattccattcctttccattccattccagtttattcaattcaac

SEQ ID NO: 1054 - DNA, 189 bp, Protomyxzoa rheumatica
acctcagaaaaggtgttgaatacgctcgagtatcaacaacagacttagagcgatatttccattttctaaaggcactaaagcacagtgtcacgtctcgcaactttaccttctctgtaaagatatcctttgatcagaagatgtcgagcggtgatggagatcagagcgagccaaagcagctgaccgtttccg

SEQ ID NO: 1055 - DNA, 129 bp, Protomyxzoa rheumatica
cattccattcctttctagtcagttgaattgcattgcattccattcctttccatctgtgtccgtttcattccattacattccaattgagtcaattccatttcattccattggagaccttttcattcagtt

SEQ ID NO: 1056 - DNA, 189 bp, Protomyxzoa rheumatica
gagtgtcataaaatggaacatggtggagttgaactgagtggagtggagaggaatgaagtggagaggaatgaagtggagtggaatggagtggaatggagtagaatgaatcggagtggagaggaatagagaggaatggtatggagaagagtggaatggaatggaatggagtggaattgaatggagtggagt

SEQ ID NO: 1057 - DNA, 141 bp, Protomyxzoa rheumatica
gagctctttgtggacaatggtgaaaaagagaatatccctgaatgaaaactagaagaagtccatctgagaaacagctgtgtcatgtggacattcatttcagagagttaaaccattgttttcattcagctgtttagaagcagt

SEQ ID NO: 1058 - DNA, 144 bp, Protomyxzoa rheumatica
taatgatgtattattcttgtgtcccaatctttttgctaagcaatctgaaaactaattgcattgttttttggcttttagtattgtagatttaaagccccatgatagtctggttctcttttccttgacccctttatgttaggaagt

SEQ ID NO: 1059 - DNA, 163 bp, Protomyxzoa rheumatica
cattccattaaataacactccattccattccattcccctgcattcaactctactccactccactccaccttattccattccatatcactccactccactctacttcattcaattccactccattccattagttttctttccactgagctaccttccattccat

SEQ ID NO: 1060 - DNA, 302 bp, Protomyxzoa rheumatica
cattccattccattccattccattcctttcctttccattgaattcaattacattctactccactccattccattccagtagaccccactccactacaatcaattccattccattccattctcgtccagtccactcaattccattccactccacacctctccattccattccattccattgcattagattccagtcccttccattccattccattccactccattccatcacattccactacattccattccaatcaactccactcaactactttccactgcatacgattccaccccactccc

SEQ ID NO: 1061 - DNA, 128 bp, Protomyxzoa rheumatica
tatgtgtgtgaggggtgtctgtgcctgtgtgtgtggtgtgtatgtatatgtgtgtgtggtgtatctgtgtgtgagtgtatatgtgtgtgtggtgtatcggtgtatgtgtgtgtggtgtgtgtgtatgt

SEQ ID NO: 1062 - DNA, 160 bp, Protomyxzoa rheumatica
ggaacagaatgaaatggattggaatggactcgaatttaatggtgtcaaatggaacggaaccgaatgcattggaatcaaatggaatggaattgaatggaatcaaaagcaatagaatggcatggaattgaatggaatcaaaaccaatagaatggaatggagt

SEQ ID NO: 1063 - DNA, 144 bp, Protomyxzoa rheumatica
tctccattccattccgttccattccgtttcatgccattccattccattccagtcctctcctcttcattccactccactcctctccactccattccattccacatcattccattccattccattccattccagtccattccattc

SEQ ID NO: 1064 - DNA, 153 bp, Protomyxzoa rheumatica
gagtagagtggaatggagtggagtggaatggagtggagtgtagtggactaaattgaaatggaatggattagagtggaaggaatggagtggaatggattggagtggagttagtgaaatggagtggagtggaaaggggtggagtggagtggaaag

SEQ ID NO: 1065 - DNA, 251 bp, Protomyxzoa rheumatica
agctcccggatctaccagccgggcccatcgtgctcaaatgccacttcagtgggggccgtgttgaatggagcgcggatcgtgatcgtctcgattttcaaggcgcgaagaacgcaatatcagctaagctggatcggaccaactcaacgatcacgctcaccgtacaatcgcagtttgaggatgctctctatcatcccgagaatatcgcagaacgtgccctggttgacgtcatcattaatagcgtattcctttta

SEQ ID NO: 1066 - DNA, 262 bp, Protomyxzoa rheumatica
tgctgcattccacacaattccactacattctattccatcacattcccttcaattccactgtattgcatttgattaaattgctttccattccgttccactcctctccactcgattccattccactactccccattccactcctttccattccgctcctcaccattctgttccattccatttcactccacttcataccatttcattgcattccctcccactcccctcctcccaattccattccattcctttccattccattcca

SEQ ID NO: 1067 - DNA, 140 bp, Protomyxzoa rheumatica
gaatggaatggaatggaatggaatggaatgcaatggtaagtagtggaatggagcatagtggaatggaatggagtgggctggaatggaaaggaattcaattgattgtaattgaatggaatggaatggaatggaatggaatg

SEQ ID NO: 1068 - DNA, 156 bp, Protomyxzoa rheumatica
tggagtggagtggagtggagtggaatggaatggagtggagtggagtaaaatggaggggagtggagaggagtgcagtggaatggagtggcatgaagtggaatggagtgtaacctaaaggagtggagtggaatggagtagagtggagtggagtgtaat

SEQ ID NO: 1069 - DNA, 147 bp, Protomyxzoa rheumatica
tacagtgagaaattatctaggcttatcattttgtgtttcataaaatgataatatataatgattctatatgaatgatgacagtatacagttgacccttaaaaaatatgagtttaaactgtatgtgaacactaaacgtgaatgtttttc

SEQ ID NO: 1070 - DNA, 127 bp, Protomyxzoa rheumatica
attcaattcgattacattcgatgattctattcgattcatttcaatgatgattccatctgattccattcgatgaatccattcaattccattctatgaagattccattcatttccattcgatgatgatt

SEQ ID NO: 1071 - DNA, 149 bp, Protomyxzoa rheumatica
agtctgggtaacagagtgagattcattcgaaataaaggaatggaatggaatggagctgaaaggaatgaaatggagtggagtatagtggagtggattggatatgagaggaggggaatagaggggaatggagtgaaatggcgtggattgat

SEQ ID NO: 1072 - DNA, 149 bp, Protomyxzoa rheumatica
tggaattgagtgtagtggaaaggaatggaacggaatggaatgaggtggagtggaatggagtggtatggaatggaacggagtgtattgaaatgaatggaatggagtggagtggaatgtaatgaagtggagagaaatggaaaggaatggaa

SEQ ID NO: 1073 - DNA, 123 bp, Protomyxzoa rheumatica
ggaaggaaagaaggcaggcagaaaaggagggagggagggagggaaagaagaaaaaataagaaagaaaaaagagaaaaagaaagaaagagagagagaaacagaaagaaagagaaagaaagaaaa

SEQ ID NO: 1074 - DNA, 358 bp, Protomyxzoa rheumatica
agcagtctcgaatggaatggaaaggaatggaatggactggaacggaatctaatggaatggactcgaatagaatggactcgaattgaaaggattcgaatggaatggacgcgaatggtctggaattgaatcgaatcgaatgtaatggtctctaatggattggtcacgaatggaatggaatcaaatggaacggaatcaaatgaaatggactcgaatgaaatgtaatcgaatggaatggaatcaaatagaatggaatagaatggaatggacttaaatttaatggattggaatggaacagtctggaatggaatggaattgaatggaatggaatggagtataacggaatgaaatggaatggaat

SEQ ID NO: 1075 - DNA, 202 bp, Protomyxzoa rheumatica
cattccatttcattccattctattccattccattccattctgtccgattccattgcattagattccattccattagattcttatcctttcatctacattccactcaattactttccatttgattccattccattccattccataccattccgttccattcgtttgcattcctttctattccattccattcgattctattgcc

SEQ ID NO: 1076 - DNA, 172 bp, Protomyxzoa rheumatica
ggaatggaatggaattgagtggaatggaatggtgtttaaaggaatggaatataatgaaatgaaacggaatggagtgaaatggaatagagtgcagtggagtacagtgaagtgaagtggagagaagtggaatcgagtgtggaggagcggagtggagtggagcagaattgagtgg

SEQ ID NO: 1077 - DNA, 167 bp, Protomyxzoa rheumatica
cattccattccattctattccactccactccactccactctattccattccacctcactccactccattccattccatttcacctcattgcattgcactcctctccattaaactccactccattccactgaactccactccgctcaactccgctccattcagtccca

SEQ ID NO: 1078 - DNA, 142 bp, Protomyxzoa rheumatica
tccattccattccattccactagggttgattccataccattccataaattcattactttccattccattccatgcctgtcgggttgattccattcaattcctttccattcctttccattccattcctctcgggttgattccg

SEQ ID NO: 1079 - DNA, 309 bp, Protomyxzoa rheumatica
ttgactgcattcccctacattccattccattctactccactaaattgtactccactccactccattccattcctttcatggtcattccattccattcaattgcattcctttccacaatactccattctactcatctccactcggttccactccactgcattccattccactcaactccattccactccactacatcccattcaattccactcccttccattgcactccactacattccattccactgctctccgtttaactccattccattctaggcaacacaactccattccgctccactccacatca

SEQ ID NO: 1080 - DNA, 253 bp, Protomyxzoa rheumatica
tggagtggagtggagtggagtggaagtcaaatagaattgtatggaatgcaatggagtggagtgaaatgaggtggaatggagtgaagtggactggagcggtgtggaatggaatggggtggactggattggagtggagtggagtggaatgttgcggagtggagtggtatgaggtgaaatggaatgaaatggagattaaaggagtggaatagagtggagaggagtagagtggaatggagtgtagtgaaatgtaatg

SEQ ID NO: 1081 - DNA, 157 bp, Protomyxzoa rheumatica
atttggtttatttagcctaattgatcattttgccataaattgaattacagtgaaagctctctgttaggggccatttctacttaaaattaagttatcacaaaatatctataataatttttaagtgaattttttgaattttatctttagacaaggtaac

SEQ ID NO: 1082 - DNA, 210 bp, Protomyxzoa rheumatica
ggcagatagatatagataggcagacagataaaggatagatgggctacatagatgataggtgatagataatagatgatgcatagatagatgatggagagatatatagatgataataggcagatagacgatagatcgatagatacatagatgatgcatagagagatcatggatagatagctatgtagatagatgatagagaaatagatggat

SEQ ID NO: 1083 - DNA, 219 bp, Protomyxzoa rheumatica
tttattccattagtgtcatttccattccattccatcccattgaggtccagtcttttccattccattccattcaattcgagtccattccactccattccattccattccattcctttagagtcctttccattccattccatcccattcaggtccattccattccattccattcttttctattccttttggatccattcaattcaacagcatttcattcca

SEQ ID NO: 1084 - DNA, 200 bp, Protomyxzoa rheumatica
gagtggagtggtgtggaatggagtggagtggtgtggaatgaaatggattggaatggagtggagtggaatggaaaggaaagaagtggaatggaatggaatcgaatggaaaggaatgcagcggtgttgaatggagttttatagaatgcagtgtctaggaatgtaatggaatgtaaggcaaaagaatgtaatggaatggaatg

SEQ ID NO: 1085 - DNA, 148 bp, Protomyxzoa rheumatica
ccactccattccattccactccactccactcaactccattccactccattcccttccattccattccactgaattccattccagtacactccactccatttcgctccactacattccattccagtccactgcattccgtcccattcca

SEQ ID NO: 1086 - DNA, 129 bp, Protomyxzoa rheumatica
ccagataccgtcaaacgcgacgctgatggttaaaattattgagacgagcaaccaaaccattgtagacgacatagtgaaatccacaaatcgacaaaacaagatcgaggatcatcagtttctcgcaacgat

SEQ ID NO: 1087 - DNA, 242 bp, Protomyxzoa rheumatica
atggagtggaatggagtggagtggagtgaaatggagtggaatggaatggaatggagtggataggaatttactggaaagaaatggaattaactggagtggattggaattgaatggagttgaagggaacggaatggagaggaatggagtggagtggagtggagaggaatggagtggagtggaatggattgggaaggttttacttgaatggagtggaatggaatggagtggaatggagtggagtg

SEQ ID NO: 1088 - DNA, 158 bp, Protomyxzoa rheumatica
attaaggatgattttgctttagggaaaagaaacctattaaaattagttatgaaatcattgaaagatacaaaattgttacaagactcaagtccaaaggcacagattggtctcacaaaccagaactacccctctggcttcatgagccccagatactgtgg

SEQ ID NO: 1089 - DNA, 144 bp, Protomyxzoa rheumatica
tcaactccattccactccactacaatccaatcaatttcactcccttccatttcagtccactccattcgactccactcctctctactcctctccagtccactccattccattccactccattccattcctctccagtccatttta

SEQ ID NO: 1090 - DNA, 212 bp, Protomyxzoa rheumatica
aacggaaaggaatgaaatggaaaggaatggaatgcaatggaatgcaatggagtgcagtggagaatagtgtactggagtggagtattaatggggttgaatcgaatggagagaagtggaatggaatggaatggaatgtaccggagtggaaaggagtcaagagaaatagattgcagaggaaatgagtggaggagagtggagaggaatggagtgga

SEQ ID NO: 1091 - DNA, 171 bp, Protomyxzoa rheumatica
tccactccattccatgccattccattccacacgggttgattctattccattccattccattccattccattgcattccattttatttcattccattcccttctattccattccactcggattccattccagtccattgcactacattccattccttccattccagttgatt

SEQ ID NO: 1092 - DNA, 146 bp, Protomyxzoa rheumatica
ccactccattccattccactccactccaatccattccattccactccagtccattccattccactccgatccgctccattccattccactcaactctattccactgcattccactccattccactccactccactctactccactc

SEQ ID NO: 1093 - DNA, 590 bp, Protomyxzoa rheumatica
ctccactccattccactccattactttccagtccactccattcccattccattccattcccatccattccactcctcttcactccacttcattccagtccactccatcccattccactcctttccattcgaatccactccactccgttccatgtcactgcactccattccattccagtctgctccactccacttcactacactccattctccactcaactccattccgctctactcaactccattccactccattccactccacttcacaccgctccagtccagtccactccatcccatttcactcctttctttcgtcaggatttctctctgtcatacaggctgtagctccattgaattctactccactttattccactccactctactccaccccactccaatcccctctatttcactccattcctttccactccattccattcctgtccattcaactcaattcaagcaaattgaactccactctattccaatccattctactcaactcctctccactccactccactccaatcgactccactcttctccattcccctcaagtccattccattccgttccactccattc

SEQ ID NO: 1094 - DNA, 182 bp, Protomyxzoa rheumatica
ttccataagattacattccattcgataccattctgttccattccattgcataccattccattccactcgattccatgttatttgattccattcattttgagtccattccattgcaatccatttcattcaagtccattccgttccactccattccattgcagtccattccattcgattgcatt

SEQ ID NO: 1095 - DNA, 129 bp, Protomyxzoa rheumatica
ctccactccactccattacgttccaccaaattgcattccattccatgccactctattacattcaattccactccattccattccactacactcccatccactacattccactccattccattcccctcc

SEQ ID NO: 1096 - DNA, 142 bp, Protomyxzoa rheumatica
gcaacggaatggaatggaatggaatggaatggaatggaatacaacaaaatgtaaacaacacgagtgcaatggcatggaatggaaagtacttgaatatactggaatggattggaatcaacccgatcagaaactaatggaatgg

SEQ ID NO: 1097 - DNA, 188 bp, Protomyxzoa rheumatica
gtgtgtatttggtgtgtgtgatatgtgattgtgtatttatgtgtggtgtgtgtatttggtgtgctgagcgtatgtgtttgtatgttgtgtgtgtatttgtgtgtgggttgtgtgtggtgtatgtgttgagtatgtgttgtgtggggcatgtatgtggatgtgtgtgttgagtgtgtatttgtgtgggg

SEQ ID NO: 1098 - DNA, 216 bp, Protomyxzoa rheumatica
gcaattgtgtggattttagtgtaaaggagtggactggaatggaaggcaatggaattgattgggaacaaatggaattgaacagagtgtagtggagtggagtggaatgcaatgaagggaaaggagaggagtggaatggaattgaatggaatggaatcgaatcgaattgaatggactggattggaatggaatggattggaatggagatcaacggaaggg

SEQ ID NO: 1099 - DNA, 178 bp, Protomyxzoa rheumatica
aatggaatggattcgaatggattgtaatggaatggacactaatggaagggaatggaatttaatggacgccaatggaatagaatggaatggaatggaatagattcgaatgaaatgcagctgaattgaatgcactcgaaatgaatggaatggaatggaatggaatggaatgggatggaat

SEQ ID NO: 1100 - DNA, 145 bp, Protomyxzoa rheumatica
agtctattccattcctttctattcgagtcaaatccactccattctatttgagtttactccattccattccaatccattccatgcgggtccattccattccattcaattccagtccactcaattctattccattccattccattcc

SEQ ID NO: 1101 - DNA, 219 bp, Protomyxzoa rheumatica
tacacatacaccacacacatacagcaccacacaccccacacatactccccacacactgcacatgtacatacagcaccacacacagagcaaacacatacatcacatacacacaccacactacacacattctacacacacatcaagcacacatcaaacactacacacactgcacacacagcaccatacacacaaaaaacgcacacatcacatacaccacac

SEQ ID NO: 1102 - DNA, 306 bp, Protomyxzoa rheumatica
atgattggagtggaatggaatggaatggagtggagtggagtggagtgtggttgaatggatttgagtggagtggagtggtgtggaatggaatggggtgaaatggatttgaacggagttcaatggagtcaaatggagcggagtggagcggaatggaatgcagtggagtggggtagagtggattggagtggagtgttatggagaggaggggagtgtagtggaatcgaatggactggaagggaatggcgtagaattgaattgagtggagaggattggaatggatttgggtggaatggactgaagtggaat

SEQ ID NO: 1103 - DNA, 127 bp, Protomyxzoa rheumatica
ccactccactccactccttttcaccacattccatttgattcaattccatgccatttgcttcaattccatgccatttgattcaattccatgccatttgattccacttgattcgattccatttgatttg

SEQ ID NO: 1104 - DNA, 123 bp, Protomyxzoa rheumatica
agtccattccattccattccatttcattcgatgctattccatttcattgtgttccaatcgactccattccattccattccattgcatccgataacattccattccattccattcgtttccatt

SEQ ID NO: 1105 - DNA, 172 bp, Protomyxzoa rheumatica
tggaatggaatggaatggaatggaatggaatggagtggattgaagtggaatggaaaggaaaggaatggcatggaatggaatggaatggagtggagtggaggggtggggataggggtggaatgcaatgaaatgcaatccaatggaatggaatgcaatggaatggaatgcaatg

SEQ ID NO: 1106 - DNA, 127 bp, Protomyxzoa rheumatica
acatttacataggacgtgacaattgacaaagggtgtggcatatgtccccagttcagtcctcatagtaacggcctgataacaggccaggcagatctgatcatccccatgtgacagatgggaaaaccaa

SEQ ID NO: 1107 - DNA, 285 bp, Protomyxzoa rheumatica
cgattctattccattcgtctccattccattctattcctttccatcctattccttccaatctattcctttccattcgtatcctttccattcgattccattcaaatccactagattccattccattccattccattcatatccatttcattcgagtccattcgattacagtgcattccattccagtgtgttccattccagttcattccatttgattccatgctcttacattccattccattcaagatttttcctttaccatcaatttcattccattccataccaatc

SEQ ID NO: 1108 - DNA, 128 bp, Protomyxzoa rheumatica
cattccatcccattcgagtaaattccatgccgttccattccattccattcattccattcctttccattccagtacatttgattccattacgttcctttccattcgggttcattccatcccgttacatt

SEQ ID NO: 1109 - DNA, 278 bp, Protomyxzoa rheumatica
tccattctattccactccattccattccggtccattccatgcgattccattcctttcgattcctatccatacttttgcatcccattcgtttccattctagtcgaataagttccatgcgagactattcccttcgagtgcattgtatttgagtccattaaattcgagtccattacgtgtgtatccattccattccattcccatccatttgatggcattacattccattatattccatttgagtccattccatttgagtccattccactgcattccattcc

SEQ ID NO: 1110 - DNA, 152 bp, Protomyxzoa rheumatica
attctactccactccactcctttcaactacactcgtttgcaatccactccattccactccattccactccagtgcattccactccactctattgcattcccttccacgccagtccatcccattcctttccattcctcatcactccattccac

SEQ ID NO: 1111 - DNA, 306 bp, Protomyxzoa rheumatica
ttctattccactcaactccactccattccattccattccatcccttgtctttccattccattgcactccattccactccactcaacaccactccattaaattacattacaccccattccattccactctcttccacttcactcccgtccacttcaccaatttctattcgattccatttgaagacattctattgcattccattcgattcaattccattcgatttcattccatttgattccattccattcgagtccattccattcgtatcctttccattccattccattctattccattccattccat

SEQ ID NO: 1112 - DNA, 145 bp, Protomyxzoa rheumatica
ttccaatccactcgtgttgattccatggaataccgttgaattccattcttttccattccggttgattccatttcattcctttccactccaaaatgttgattcctttccatgccattccattccattccattccacttgggtagat

SEQ ID NO: 1113 - DNA, 202 bp, Protomyxzoa rheumatica
attccattccactccattcctttccaatcgtttccagtccattccattccactcaactccatagaattctattcctttccattcctttaaattgcattccattccgttcaattccattccactcgaccccactccactccactgcactccattccattcctttccattccatttcactcaattccattccactccatcccac

SEQ ID NO: 1114 - DNA, 129 bp, Protomyxzoa rheumatica
gagtatgatacattcgaaataaaagaatggaatggaatggattagaatggaatggagtgaagagtcatggagaggagtggaatggaaaggaatgtagaggaattgaatggaatagaatgtatcatactc

SEQ ID NO: 1115 - DNA, 137 bp, Protomyxzoa rheumatica
ttgaatagaatcaatccgaatgtaatggaatgaaatgcaaaggaatggaataaaaaaggaatggaacggaatcgagtggacttgaatggaatggaaaggactcgagtggaatggagtggaatggaaaggactcgaat

SEQ ID NO: 1116 - DNA, 131 bp, Protomyxzoa rheumatica
tgaatggaaatgaatggaattgaatggaatggaatcaaatggaatggaacataatgggatgtaaaggaaaggaattgaatcgaatagaatggaatggaatataatataatggaatgcaatggaacggactc

SEQ ID NO: 1117 - DNA, 254 bp, Protomyxzoa rheumatica
gtctctatgacctgccttgggaaagaaggattctagtttctttggctggccttggggaggatgagggaccagggacaggagggcagcagaaggttagagagactcttgtttctgagggcttcattttggggtatgattttctgaggccctacaaaggagaggaggaagttagccttgaggctattaaggctattgagccttaaggctactaagtccctaagctggagcatactcagtgagggtgtgaaagactg

SEQ ID NO: 1118 - DNA, 176 bp, Protomyxzoa rheumatica
gcaatataattgattcgaatggaacggaaatgagaggaatgtaatcaactgcaatggagtgcaatgcaatggaatgtaattgaagggaaggcaatggaattgaacggagtggaatcgattggaatggaatcgaatggaatggaatcacatagattggaatcgaatggaaaagactg

SEQ ID NO: 1119 - DNA, 304 bp, Protomyxzoa rheumatica
tatttcatttcatttcattccattgtgttccattcaactacactccgttccaatacattcaacgctattcctttcatcccattgcactctattccattccactccatttcattccattccactccaatccattccattccactctactcaattccactccatttcattccacaccacctcattccattccattccgtttctctccactccattccactgcattccatttcactccactccccttatttccattctattccattccattcctatcaatttcattccattccattcctatccacac

SEQ ID NO: 1120 - DNA, 232 bp, Protomyxzoa rheumatica
cgcttgttgcgtatgcattgcagagttgcctgaccgcttttgccgagcgcatgattgctctgcatccgccaatgtcttgcatctgcgagagagtcatagtcggaaatcgagaaagtttgtgttcgatcgatgagagtcgcttgattcgttgagcagtgattattccactgtcaatcaattttcctcgtcgtttcagtccaacgtgaaatgtattgagcggaaaattgtgcga

SEQ ID NO: 1121 - DNA, 138 bp, Protomyxzoa rheumatica
aatggagtggagtggaatggaatggagtagaacggaactgaacggaatggaacggaccagaatggaatggagcggagtggggtgaagttgagttgagtggagtgaatcatagtgcactggaatggaatggattggaat

SEQ ID NO: 1122 - DNA, 175 bp, Protomyxzoa rheumatica
agaatggaatggaatggaatggaatggaatggaatggaatccacaccagtggagtggaatggaatggaaaggaatggaacgcaatggactggaatgtaatcatcctgagtggaatggaatggaatgaaatggaatgggattgaattgtacggagtggaatggaatcaacccgagt

SEQ ID NO: 1123 - DNA, 229 bp, Protomyxzoa rheumatica
atttcatttcattccattccattccattccattccattcctttaaattccactcggtttgattcaattgaattctattccattccattaaattccattccattccattccactcactttacttcaattgaattctattccattccattccattccattccactcggtttgaatcaattacattctattgcatttcactccattccattccattccattccattccattc

SEQ ID NO: 1124 - DNA, 228 bp, Protomyxzoa rheumatica
tattccattgtattccattccattccattcaactccattctattccattccactccacttcattcctttccactcccttgcactccacttttgccattccattcccgtcaattatactcaattacgttccattcctttcccttcaattcttctcaactatgttacattccattccaatcgattccaaacccctcccctccatttcactccattctcttcctctccatt

SEQ ID NO: 1125 - DNA, 156 bp, Protomyxzoa rheumatica
ccactccactctgaaccactccacttaactccacttcattcctgtccactccactcagttccgttctgtttctttcctttccattccattccattccattccgtttcgttccattacattccaatccccttcattccattgcagtccacatcactc

SEQ ID NO: 1126 - DNA, 164 bp, Protomyxzoa rheumatica
caaacgcttgcgcaaagggctgcaccatggaactgggatggcaagtgtttccaccatacccccacattgcatagccggcgtcctggatctcgcgcgatttccgctggattatgtcgtccaggtcctcgtttgcgtgcgtcccgatcttcataaacaaaatgccg

SEQ ID NO: 1127 - DNA, 122 bp, Protomyxzoa rheumatica
gcgcttcgccgcgcagcagggcttctttgtttcgagaatgcagcgcaaactgcatggctaccacttggacgatgcgccaaacttaaagtcgtgcaatctgtttgttacgtctttaccagacc

SEQ ID NO: 1128 - DNA, 176 bp, Protomyxzoa rheumatica
aagattgtgctactgcactccagttgagtgacaaagtggaatccagttgacgtaaaggaacggaatggaatggagtaaaatggtatggaatggagtggagtggaatcgaatggagtgtaatggagtggagtagagtggaattgagtggagtggaatggagtggagtggagtggagt

SEQ ID NO: 1129 - DNA, 152 bp, Protomyxzoa rheumatica
gcattccatttgattccattccattctattctattccatttgactttattcccttccattccattccgtacgattccattgcattctattcctttccatccgattccattgaattccattccattccagtcatttgcattccattcgtgtcc

SEQ ID NO: 1130 - DNA, 208 bp, Protomyxzoa rheumatica
ttccattaatttgcatacctttcgtgtgcattccactctaatccattccctaggagtctgttcaattccaatacataccattcgattcctttcctttccattccaatggagttctttccaatacactccattccattcttttcctttcaattgcattctatttcataaaattccattcaattccattccattcgaatccattccattc

SEQ ID NO: 1131 - DNA, 220 bp, Protomyxzoa rheumatica
ggaatggaatggaatggaatggagtggaatggagtggagttcagtggaatggagtggagttgaatggaatggagtggagtgtaatggagtggaaaggtatggactgtagtggaatggtatggagtggaatagaatggaatgaaatttagagtattggaatggaatggaatgaaatggaaaggagtagaatggaatggaatggaatggaatggaatcaact

SEQ ID NO: 1132 - DNA, 165 bp, Protomyxzoa rheumatica
accaccaccattatcactatcaccttcatcatcaccaccatcatatcacattatcatcaccatcttcaccatctcatcatcactatcaccttcatcaccatcatcaccatctaatcacctccaccatcattatcaccatcatcaccatcacaaccatcatcacca

SEQ ID NO: 1133 - DNA, 662 bp, Protomyxzoa rheumatica
gatcgaattcatgatgacggcgtcgtcgctttcattacgaatcgctctttcattgaagcgcgatcgttcgacggcttcagaaaatgcattcagtcagaatttgacttcgcttacttcatcgatctcggtggggatattagaagcctttctggaaaagacgggatctttttgaacgaggatcacacgatttttggcatgtcagccgccgtgggaatagcagtatcgtttctagtaaagaaacaggcccgcaagaagctgccatgctctattcattacatccacccatgcgacatccgggcgactcgagatgaaaaactcgcctatctctccagtactcccttccggagcattgagttcaatgtcgtcagtccggatgaatccagcaactggatcaatattactgacaacgattttggttcgctagtcccgataatcgacaaagacacaaagcttgccaagaaaaagaggggcgaacaagcaatcttcaagctttattctttgggggtggtgactgccagggatgagtgggtctacgatttcagcccgcacctactaaacaacaaagtgagcttcttgatcgatacttacaactccgaactgaggaagcttggaggttccggataccaaggtcaggcgaacgaattaaatgagactatcaagtg

SEQ ID NO: 1134 - DNA, 321 bp, Protomyxzoa rheumatica
cattccattccattccattccattccattctgttccattcgatttgattccattccattccattccattatattcgagtccattgcattgcatttgaatactttccttttaatttcatttgtgtccattccattccattcaattctatttcattcaagtccattgcgttccattccaatcaattccattcccttccattccagtccattccattccatccaattccattccatacgtttcatgtccattccattcctttccattgaagtccattccattccattctattccattcgaggacattccattccactccattag

SEQ ID NO: 1135 - DNA, 134 bp, Protomyxzoa rheumatica
ggaacgaattgtaatggaatggaattgaatggaatgcaatagaatggaatggaatcctcttgagtggaatggaatggtatggaatggagtgaaatgcaatagacaggacttgaatcaacccgagtggagtggag

SEQ ID NO: 1136 - DNA, 156 bp, Protomyxzoa rheumatica
agacagatgatagatagctagatagagatagattagatagatatagataggcagacagatgatagatggatagatatagataggcagacatgatagatatagatagacagatgatagatataggtagatgggcagacagatataggtagataggca

SEQ ID NO: 1137 - DNA, 343 bp, Protomyxzoa rheumatica
gagtggaatggaatggagtggaatgtaacggagtggattggagaggaatggattggagtggaatcgactggagtggaatggaaaggattggagtggacaggaatggaatgaagtggattggagtggagtggaacagaatggaacggagtgcagtggagtagaatggaatggagtggaacggaatggagtggaagagaatggagtggggcagagtggagtggactcgaatggaatggaatggagtggaatggattggaacgaaatgggaaggaatggattggagtggaatagaatggagtgggatggaatgaagtggaatggaatggagaggagtggagaggaa

SEQ ID NO: 1138 - DNA, 163 bp, Protomyxzoa rheumatica
ttctaagcccagagccctgtgcccacccataaagctggccatgcttgggtcccctggggtgaggactggttgaaggagtggacaccaaactgtcttatgacctttagagaaatcatgtaaagttcatgcctacttggtgggcgcatgaccagcatcaatttca

SEQ ID NO: 1139 - DNA, 241 bp, Protomyxzoa rheumatica
ttcaattccattccattcctttcctttccattccattccactctactccattctattcaattccactccattccattctattctattccattccgtttctttccatcacacggaattccattccatggaattccattcaattccactccactccattccatccaattccactccactccattccattccattccactccattccaatgaattccattcctttcctttccattcaattccat

SEQ ID NO: 1140 - DNA, 162 bp, Protomyxzoa rheumatica
ttccattcgattccattgcattccattccattccattccaatcaattccattccgttctattccattcaaatctactccattccattccattccatttgcatccaatccatttcattcgagttcattccattcaattccattcgataccattacatatcatt

SEQ ID NO: 1141 - DNA, 249 bp, Protomyxzoa rheumatica
taaatgccattccattccattcaattcctttgtaatccactcctttccattctgttgttctacattccattccaatcaactccactccactacattgcactccattccattccaattcaatcccttcctcaccattccatatcattacattccattatgttccattccactccagtcaagtccattccactgtactccattccaattcattcccttccactccacttgactccattccattccactaaa

SEQ ID NO: 1142 - DNA, 175 bp, Protomyxzoa rheumatica
cattccattcgcttccattccattcgtgtccattccattctagtccatttgactcgtgtccattccacacgagtccattccattcgagtccattcctcccgaatccattccatttcactccattccattccatttcattctattccattccattcgcttccattccattcgtgtc

SEQ ID NO: 1143 - DNA, 245 bp, Protomyxzoa rheumatica
gtaacctatgtatcaattatctatctacctatcatctatccctgtagccatctatccacctatctaatgcattatctatctgttgaatctataatctatgtatcacttatctatcatctctccatctagctagctagctatctacctaccatctctctactatctatagttactatatatccatcatctattattcatccatctatccatctatctatatatgtatttatctattgaatctataa

SEQ ID NO: 1144 - DNA, 160 bp, Protomyxzoa rheumatica
atggaatgaagtggaatggaatggaatagaataacttggagtgcaaaggactggagtggaagggagtggagtggaattgagtggaattgattaaaaaaatggaatggaatggaattcagtagagtggaaaagagagtactggagtggactggaattgggt

SEQ ID NO: 1145 - DNA, 275 bp, Protomyxzoa rheumatica
cagtggaatggaatggaatggaatgaaatgaaatggaatggagtgaagtggaatggaatggagttgaggagaatggaatggaatggaaaagaaggaaatggagaggcggggagtggagtggaatgcaatgaatttcaatggagttgagtggattggaatggaacagaatgcagtggaatggaatggaatgaaatggaaagtagtggaatggaatctaacggaaaggagtggaatggaatggaatggaatacaatggaatggagtggaatggagag

SEQ ID NO: 1146 - DNA, 171 bp, Protomyxzoa rheumatica
attccattccatcccactgcattccattccattccagtccactcaattccactccactccacgccattccactccattccacttcaatctattccattgaattccaatccactccattcctttccacaccactacactccattccactccatgccactccattcaattcca

SEQ ID NO: 1147 - DNA, 126 bp, Protomyxzoa rheumatica
tggagtggaatggaatggagttaaggcaagtggaactgaatggaatgtagtagagtggagtggattgcaatgtaatgtaaaggaatggtatgcaaatagtggaatggaatggaatggaatggaatg

SEQ ID NO: 1148 - DNA, 129 bp, Protomyxzoa rheumatica
cattctactccattccactccaatccactccactccacttcactcctttccattccattccattccattccactgcaatctgatccactcactacactccaatccattccaatccattccattccattc

SEQ ID NO: 1149 - DNA, 451 bp, Protomyxzoa rheumatica
tcctctccggcgtcagtggtcaaggcgccgggcaagacactggcaatgctgcccaggcttattcctcggccatgttctacagcattacctatgtgctgaccaccctcggtacctttggcgtgattatggtgatgtcgcgcaaaggtttcgaggttgaaaatatcagtgatctgaaagggttgaacaagcgtgcaccatggttggccttgattatgttgttgctgatgttctcgctggcgggtattccacccatggtgggttttgctgccaagttggcagttttgaaagccttgttggccactggtcaggtttggttgactgtctatgcagtgatgttcagcctggtgggtgctttctattacattcgtattgtgaaaacgatgtattttgaagtccctgctgatgaaactgaaattgtgatgggtaatgatgcacgcgccgtgttgggttt

SEQ ID NO: 1150 - DNA, 206 bp, Protomyxzoa rheumatica
ggttgcttacaaaaggcaggttcgcaaacagcaaggccaagccaaacaacacccaatgcccgatcgtttgcgtcaaaacctacctcccgtgaatactcaaaaaagccgaatttattaattaaccagccagtgtttgctgaattgcagtcatgcaataagccattagaggcgcaggcagcaagcccagcgcgatcacagccaagccg

SEQ ID NO: 1151 - DNA, 142 bp, Protomyxzoa rheumatica
ggaatctaaaggaatggaatcggatggaatggactggaatggaatggtctggaacaaaatggaattgaacagattggaattgagcagaatagaaaataacgcactggattagaatggtctcgaatagaatggagtcgaatgg

SEQ ID NO: 1152 - DNA, 175 bp, Protomyxzoa rheumatica
gcacacaccacaaaacacatgacacacacaccacacacaacacaccacacaaaaccacacacagcacacaccaaacacatgacacacaccacacacaccacacatgatatatacacaccacacacaaacaccacacaccacaaaacaccacacacacaacacacaccatacaaac

SEQ ID NO: 1153 - DNA, 142 bp, Protomyxzoa rheumatica
cattctaccccaatccattcctttccattccaatctattccactccattccattccattccatttcactccacttcactcctttcccctccattccattgcactccattctataccactccattccattccattgcattcca

SEQ ID NO: 1154 - DNA, 156 bp, Protomyxzoa rheumatica
aattccattctattccattccattccatttcattaccttaaattccattccactccattatattccactcgtgttgtttccgttccattccattgtattccattccgttcaattccactctgcttgattaaattccgttctattccattccattcc

SEQ ID NO: 1155 - DNA, 130 bp, Protomyxzoa rheumatica
cccaaatgagttcataaatataaagcatttgtagcagtgcttggcacattgtaaataagcataagagtgtaatacaagtgtttgctactgccttttctggtagtggtggtggtgttactggcggtgatgg

SEQ ID NO: 1156 - DNA, 137 bp, Protomyxzoa rheumatica
tattcgattccattccattcgagtccattccattccattcaattccatctgatgccgttccattcgattctactccattcgacaccattccattccattccattccatccgattttattccattctattcctttcat

SEQ ID NO: 1157 - DNA, 130 bp, Protomyxzoa rheumatica
tggaatggaatggaatggaaaggaaaggaatcctcccgattggaagggaatggaattgaatgccttggaatggaaaggaatgtaatggaatgaaacggaatcaccctcagtggaatggaatggaatagaa

SEQ ID NO: 1158 - DNA, 343 bp, Protomyxzoa rheumatica
gaaaggaatggactcgaatggaatggaatgaactccaattgaatggaaaggaatgaaatggactcgagtggaatggagtggaatggactcatgtggaatgaaatgcaatggactcgaattcaatagaatagattgaaatggactcgaatggaatgtcatggtatacaatggaaaggaatgcattggacttgaatgttacggaatgaaatggactcaaatggaatggaaaggactggagtggaatggaatggaatcaaatagaatcgaatgggttggagtggaatggattcgaatggaatcaaaaggaatttaatggattcaagtccaacggaatgtaatggta

SEQ ID NO: 1159 - DNA, 135 bp, Protomyxzoa rheumatica
agggaaagggaaggaaggaaggagggaaggaaggagagagggaaggaaggaaggaagtagggagggaggtagggatggaaggaaggaaggagagatggaagggaggaatgaaggaaggagggaaggagggcagga

SEQ ID NO: 1160 - DNA, 130 bp, Protomyxzoa rheumatica
tctcacatcagccctgatcctcaacttcacccagagccttggccaactccaatcttaatcttgaccctgaccctgatcctcaaccagatacttttctgaccttaccctgaactgttttgcatcttgacct

SEQ ID NO: 1161 - DNA, 135 bp, Protomyxzoa rheumatica
cacagacactgcacacacttcacacaccacaccatgtgcacatgcacacacacacagacatcacactgcacccacaccatgtatacatgcacacaccccacacacaccacacactgcacacacaccatgtgcaca

SEQ ID NO: 1162 - DNA, 147 bp, Protomyxzoa rheumatica
caaaaacaattgcaaaattttctaggtagacacatcctcacaaaatttgcagtttttctgcagatacattctcaataacaatggatttaattcaaaataatacaaatgtgagagtaaaaaaaatgacgatgtttcaaaaaatttaag

SEQ ID NO: 1163 - DNA, 522 bp, Protomyxzoa rheumatica
cccaaattgcacgaagttcgtcgatcgatgattgcatccagataagtgaaaatttgctacaccttaagtagtcaatggcatttaggtagggtggagaagtaataattaggtcgatcgacttggtgtcaacgggcaatctgcgtgcatcgccagagagcgcttgtgcaggaacatgatcacgcgaaatggatgcgcctgcggaatttgcgatcacgtgctcgaccgcagagcagaaattctcaaatggttttgcgggtgcccatctgtaagctttatgtgggcggctatgggccaggtccatagcaagcgacgaaccctttgatttcgcgatgatcaaacgagaaaacgcgcaccatagtgcatcccgtgcgtctaaatgaggtactaccctgatagattctgcgagcgatgacagttgtcgccgtgagaaatgatcgaaccaatagcgagcgaacgccttcgtctcttcatcagcatctgtcgggaatgcatcgtcgctccgcagagacttatatctaccct

SEQ ID NO: 1164 - DNA, 186 bp, Protomyxzoa rheumatica
cggatttgattttttttatagataggcatgatcataatatacaaatatacaataccaacaacccgattaaaaaaacaagactaaagaaacaacatccatgagtgacgtggagtttccatgctgcatcaaatctttaattgcactgcataggaaaataagagttcaaacgattttattgtaacaatt

SEQ ID NO: 1165 - DNA, 147 bp, Protomyxzoa rheumatica
catgctgccccgtgagtgagacaggattcctatctccgacatgaccttcaagcatcctagcaacttggagacttgggattctaaagccaaatttgaccttgacctaggcaagatgtgacaataaaatgaagaagaaggttttgtctt

SEQ ID NO: 1166 - DNA, 143 bp, Protomyxzoa rheumatica
cagcatcaaccataccaacaccaacagcatcacataccaacatcatcaaccataccaacaacatcagccataccaacaccaacagcatcaaccataccaaaaacatcagccatactaacagcatcaactataccaacagcatc

SEQ ID NO: 1167 - DNA, 138 bp, Protomyxzoa rheumatica
aagaattcaatgaatacttgctgtaatcctacagcattattgacgtgccaatattggtactctgatctattgtaattgtctatgtgccaaattctgcatctgtaaaataaaattatatttggactttctgatgcagtg

SEQ ID NO: 1168 - DNA, 127 bp, Protomyxzoa rheumatica
taaaatggagggtcctggtctggaggaggtggcatatctgagaacaaggataaaacacggaactgaaaatagtgcaagtctgcatgctgggcagggaaggcccataccacccccctgtctgctccct

SEQ ID NO: 1169 - DNA, 183 bp, Protomyxzoa rheumatica
cccactccattccactccattccactccacttcactccactgcattccattccttcgcaggccattccattccattccactatattccattccacaccattccactcaactccattccgttccacaccacgccactccaatctactccactccactccattgcattccattccactccactcc

SEQ ID NO: 1170 - DNA, 153 bp, Protomyxzoa rheumatica
cattccattccagtacattccattccattccattccattctattgcattcgacatccatcaattcgattacactcccgtcaactccattactttccattccattcgattccttaccgttccattacattcactccattccattccatcccgtt

SEQ ID NO: 1171 - DNA, 326 bp, Protomyxzoa rheumatica
ccattcgtgtgaattccattcctgtccattcaattcaattccattccattccactgcattccacaccattccacaccattccattccattcgactccattccactccactctactcctctcgattcaattccattccacctcattccattcctctgcattccactgcactccacttcactgcattccattcgatatcacttgattctattcgattccattggatgccattcgattccattccattcgtttccattccaatcaactccattacgtttgattccattctttcgattccattccattcgtgtccatgccattccattcc

SEQ ID NO: 1172 - DNA, 130 bp, Protomyxzoa rheumatica
ctcgaatggaatagaaaggaatggaatcaaatggaatggattggaatgaaaagaactcgaatgggttgaaatggaatgtactcgaatggaatggaaacgaattgactcaaatggaatagaatggaatgga

SEQ ID NO: 1173 - DNA, 154 bp, Protomyxzoa rheumatica
cccggagacggcccggaatatactgcgtattcgtgacgagcagcggcacgccgtcattcaggaccagttcgccgatatccccgggctggccgccgctttcagcatagaagatcgttgtctcgagacataccccgtcctcggactgatcgacaat

SEQ ID NO: 1174 - DNA, 136 bp, Protomyxzoa rheumatica
gtccttgatgaggaagctctcgcaagtgttcgcctgctgatgcaatacgaagggatcggggttggactgtccagcggcgcgaatattgcgggttgtctcaagatcgccgctacgtccggacccgacacacgaatct

SEQ ID NO: 1175 - DNA, 126 bp, Protomyxzoa rheumatica
acgttccattccattccattccaatccactcgtgttgactccattcctttccattccattccattccattagattccattatattctattgtactccattccattccactccattccattctattc

SEQ ID NO: 1176 - DNA, 124 bp, Protomyxzoa rheumatica
aaagggcattgaatggaatggaatcaacccgaatggaatgcaacggaatggagtggaaacgcatgcaatggaatggaatggaaaggaatcaacacgaagggtatggaatggaatggaatggaat

SEQ ID NO: 1177 - DNA, 143 bp, Protomyxzoa rheumatica
ctccattccattccactccactccattccattccactcgtttcctttgcatttcactccactgcactccactccaatccaatccattccattcctttccattgcatttgtttcctttctgttccattccaatcctttccattc

SEQ ID NO: 1178 - DNA, 212 bp, Protomyxzoa rheumatica
tggagtggagtggattggaacggagtgaaatgggatgtaatggaaaggagtggaaaagaaaagagtggaatggacaagaattgaatggaacggaatggaaggcagtggagtggagtggagtgcggtcgactaaaatgaaattgaaaggaatgaaaaggaattgaacggaatggaatggaatagaatgcagtggagtggagtggagtggaatg

SEQ ID NO: 1179 - DNA, 187 bp, Protomyxzoa rheumatica
gggtgtttcctaaaatgtatgtgattagtatagcttgggcatatgctagtcacattcttctcacactcagttatctatgctaccaaataaagtaggagtacatgggtattttattgtctcagctttgctttctggagaaatcgggctgagtttagctgtttgatgctttgttactactttgtagaaa

SEQ ID NO: 1180 - DNA, 285 bp, Protomyxzoa rheumatica
tacaaaggtttacaatggattttaaaagaattttaaagggttttaaaagatttacaagggatttttaaagggttttacaagatttacaagagatttttaaagggttttaaaaactttacaagggatttttaaaggttttaaaagatttacaaaagatttttaaagggctttcaaagatttacaagagctttaaaagatttacaagggtttttaaaagatttttaaagggtttaaaaaggttttaaaagatttccaagagtttttaaaagatttttaaagaattta

SEQ ID NO: 1181 - DNA, 148 bp, Protomyxzoa rheumatica
attccttttgattccattccattcatttccattccattcgactccattctattcgtgtcaattccattccattctattccgttccattagattccaatccgtttgattccattttattccagtccactgaattcgagtccattccatt

SEQ ID NO: 1182 - DNA, 169 bp, Protomyxzoa rheumatica
aaaggacgtatttcacccaatttgtctcctttgaaatccccagtatctttaatttaaaaaaaaacatctagtacatggtgcatgctgactgacttgcaagtggtcgtcactgtaattcaactgatggcaaccttacagctagggctcccatcccccactatgctcccta

SEQ ID NO: 1183 - DNA, 157 bp, Protomyxzoa rheumatica
cattccattccatttgagtagtttccattccattccatcccattcgaggccattctaatctattccattcccgttgagtccattccattccataccattctattcgagtccattccattccgttggtttccttccattccattgcatttgagtccat

SEQ ID NO: 1184 - DNA, 187 bp, Protomyxzoa rheumatica
cattccattcgtgttgattaacttccattccattccattcgatcccatcccattccactccgttccattccattcctttcccctcaggatgattccatttcattccattcctatccattccattccattcgggtatcttccattgcattccattccatcccttcccattccattccgttccattcca

SEQ ID NO: 1185 - DNA, 115 bp, Protomyxzoa rheumatica
actggaatggaatggaatcgaatggaatgagatggaatggaatgggatcgaatcaaatggattcgaatgcaactgactggaatggaatggaatcgaatggaatgagatggaatgg

SEQ ID NO: 1186 - DNA, 187 bp, Protomyxzoa rheumatica
gaatggaatagaatggaaaagaatagaatggaatcaaccccagtggaatgaaacggaatggaatggaatagaatggaatgaaatggaatggagtggaaaggaatggaatggaatcaatccgagtagaaagaaatggaatggaatcaacacaagtggaatgaaattgaatggataggaatcaattgaa

SEQ ID NO: 1187 - DNA, 143 bp, Protomyxzoa rheumatica
gaaaaagcatgcactccagatcttctgacacagctttgatttctctcctgttgccccccatactacatgcataggcactggctacttatacccattttgggatctgaacaaaatagtcctaccagagctgactgatgccatct

SEQ ID NO: 1188 - DNA, 361 bp, Protomyxzoa rheumatica
attccattccattcgagtccatgccattccattccattccattcgagtccattcactcccattccattacattctattccattccattccatttcattccactcaagtcttttcgattccattccattcctttcgaatacattccattccattcgagtcctttaaattcctttccattcgattccattcgattactttccattctattccatcagagtccattccactaaattccaatctattccattcgagtccattcctttccattccattcaattcgtggtttttccattccattggagtccattccattccattctttttaaattcattccattccatccctttctattccattcaa

SEQ ID NO: 1189 - DNA, 176 bp, Protomyxzoa rheumatica
aatggaacagaacggaatgcaatggaatggaaagcagtggaatcaagtggaaaggtatcgaatggaatggacttgaatgcaatggactggaattgaatgcagtcgaatggaatggagtggatcataatggaatcgaatggattggaattcaatggaatggaatggattcgaatgga

SEQ ID NO: 1190 - DNA, 143 bp, Protomyxzoa rheumatica
catttgatgatgagttcattcgattccattcaatgatgattccattccttttcattgggtgattctattcgattccattcgatgatgattcctttcgattccatttgatgatgattgcattcgattgcacttgatgattccat

SEQ ID NO: 1191 - DNA, 132 bp, Protomyxzoa rheumatica
tttgtggtatggtgtgtaggggagtgggtatgtggtatgtgtgttatgtgtagcgtgtgtgtgatatgtgtgtggtgtgtgtgtgctgtgtatgtggtatggggtgtgtgtgtatggtatgtggtatgtgtg

SEQ ID NO: 1192 - DNA, 172 bp, Protomyxzoa rheumatica
ctaattattgatatgcaaatctgaccgttgctatcacaagaaacaaaacaagcaaagagacacatatttgttgttcggttaattaattctcatcatcggagtttggtgacaatttgtaattatatattccaggtaagaataatctgtcactaaatctaatttagaatgttca

SEQ ID NO: 1193 - DNA, 131 bp, Protomyxzoa rheumatica
agtggaatggagtggagtcgaatggaatggaaaggaatggagtagaaaggaattgaatggaatggaacgaatggaatggaatagaaagtaaaggaatcgaatggagaggagtggattggagaggaatggaa

SEQ ID NO: 1194 - DNA, 177 bp, Protomyxzoa rheumatica
atggaatggaatgaaatgaaatgctgtgcagaggaaagcaacggaatggagtgtcatgcaatggagtggaatgaggtggaatggaatgtattggaatcgcatggaatagaatcgagtggaatggaatggagtggaatggcgtgaaacggaatgaaatggagtggagagtaggggatt

SEQ ID NO: 1195 - DNA, 127 bp, Protomyxzoa rheumatica
atattatatatataatatgttgtatgtataatacatatattaaatatatattatatgtctatgttattaattatatgtaatatatgttatatattatatattttccatagaatatacatgttacata

SEQ ID NO: 1196 - DNA, 330 bp, Protomyxzoa rheumatica
ggaatggaagttgagtggagtggtgtggggtggaggcaattggactggggtggaatggaatggaatgaaatggactggaattgaatgtagaggagtggaatgtaaaggagtggagtggaatagaatggattgaagtgcaataaaacggaatggagtggaatggagtggaatggagtggattgtagtggaatggagtggagtggagtggagtggaaaggaatagacaggagttgaatggaatggagaggaatggaggggaatgaaatggagaggagtggaatgcaatggaatggagtgaaatggaatgaaatggaatggagtggaatggaa

SEQ ID NO: 1197 - DNA, 149 bp, Protomyxzoa rheumatica
tgaatcaaaagaaagttttaattccatgagatgaatctgcatggcacaaagcagctttacagattgacactttctaatttttatgtagggatattctgtttctctccaattggctcccaaatgtccctccaaaaacagtgtttccaacc

SEQ ID NO: 1198 - DNA, 143 bp, Protomyxzoa rheumatica
aaaggaatggaatggaatggagtggaatggaatggatttggattaaatggagtggaaggagtggagtggagtggagtggattgtggtgcagtgtagtagagtggtatggagtgaaatgaaatggtgaaatgaattgtgagctg

SEQ ID NO: 1199 - DNA, 200 bp, Protomyxzoa rheumatica
tggaatagaatggagtggagtggaatggaatgaaatagaatggaattgaatggaatggaatggaaaggaatggaatgtaaaagaatggaatggaaaggaatgtaatggaatgtagtggagtggattggaatggagtgtcgtggaatggaatggagtggtgtggaattgaatggagtggagtggagtggaatggaatggaa

SEQ ID NO: 1200 - DNA, 166 bp, Protomyxzoa rheumatica
cacatgtttgtgtccagggcccactcctgagtcctgaagcgtgtgagtctcctggggctgctgtcacaaatgaccgcaaactgggcaagtgaacacagcagcaatctatcccctcagcttggagaccagaagtctgaggccgagctgtgggaagggtgggtgaccc

SEQ ID NO: 1201 - DNA, 188 bp, Protomyxzoa rheumatica
ggaatgaaatggaatggaatggaatggaatggaatcaaagtaattgtaaaggaatgaaatgaaatggaatggaatggaatgcaattgaatcaactcgattggaaaggaatggttggaatggaaatgaaaggaatggaatggaatgaaatcaacccgaatggaatggaatggaatggaatggaatggaa

SEQ ID NO: 1202 - DNA, 208 bp, Protomyxzoa rheumatica
tggagtggagaggaatgcagtggattggattggaggagagtggaatagaatggaatgtagaggagtggaatggaaggaaatggaattgaatgtggtggagtggaatggggtggaatggagtggagttgagtgaatgggatgtaatggaaaggaatggaatggaatgggatggaatggaaaggaatggaatggaatgcaatggaatgga

SEQ ID NO: 1203 - DNA, 164 bp, Protomyxzoa rheumatica
atggaatggagtggagtgcagtagagtggagtggagtgcagtagagtggagtggagttgagtggtgtggatcagagttcagtgcaatggaatggaatggaatgtagtggaatggagtgagtaaagtggagtggagtggaatggagtggaatggagtggaatgaa

SEQ ID NO: 1204 - DNA, 194 bp, Protomyxzoa rheumatica
attcctttccattccattctattccattaaattccatgcaattcgacatcattccattccattcctttgcattcctattcactcttttccattccattccattccattcaagtccattccatttgaggtcattcctttcccttccattacattggattcctttccattccattccattccattcgagtccattc

SEQ ID NO: 1205 - DNA, 254 bp, Protomyxzoa rheumatica
tccattccattccattccattccattcccctcaatgccactccattccactccactccactccactccgttccactccaatcgacaccactcctctccactccattcaattccatcccattccattccactccatttcactccacttcactccactctactccactccattcaattgcactccaaaccattccattccaatccactccactacactccagtccactactttccactccattctattccattcca

SEQ ID NO: 1206 - DNA, 176 bp, Protomyxzoa rheumatica
gtttcattccgttacattgaattcgaatccattgcattccattccattccattccattcgtttccgtcccattccattccaatccgttcgattccaatccatttgagacctttccattccatttcattcccttcgtgtccatttgattcgattccattccattagattctattcca

SEQ ID NO: 1207 - DNA, 329 bp, Protomyxzoa rheumatica
cattcgattccattccattagattccattccaagccattactttccatttggttccattccattccattccattcctttccattccatttgatttcattccattccatttctttccactacaatccattccattctattccattccttttgagactattccattcaaatgcattccattcaagtccattccattcgattccattctatttgattacattcctttcgattatattgcattccttaccattccatttgagaccgttccattcccttcattccattcatgtcttttcgtttctattccattgcatttgattctattccattc

SEQ ID NO: 1208 - DNA, 132 bp, Protomyxzoa rheumatica
tgaattgaatggattggactcaaagacaatggaatggtatgcactccaatggaatagaaaggactagaatggaatggaatttactgtaatggactctaatggaatggcatctaatggaatcgaaaggaatgg

SEQ ID NO: 1209 - DNA, 226 bp, Protomyxzoa rheumatica
ttccatttcattccactcaattccgttcaattctactctattccatacatatccattccattcaaatccattccattccatttcattccattcaaatccagtctattccatttgattccattgcattccgttccatccgagtccattccgttcctttccattccattccttttgagtgcattccactacattccacaccattcgcatccattcctttgtctttcat

SEQ ID NO: 1210 - DNA, 285 bp, Protomyxzoa rheumatica
aatggaatggagtggagtttaatggaatggaatgaaatggaatggaatgcaacagaaaggagtgaaatagaacagaacagagtggagtggagtagagtggagttgagtggagtggattggagtgcagtggaatggaatggattggagtttaatggagaggagggagtggagtggagtggaatggagtgtaatggaggggaatggaacggaatggaacggaaaagaatggaacagagtggggtggtgtggagtggagttgagtggagtggaacgaagggcagtggc

SEQ ID NO: 1211 - DNA, 154 bp, Protomyxzoa rheumatica
agtgaagtttaatggaatgtaatgcaatggaaagggtaggaatggaagagaacggagtggattggagttgagtgtaatggagtggaatggaatagaatgtaatggaatgaaattgaatggaatagactcgaatggaatggactcaaatggaatg

SEQ ID NO: 1212 - DNA, 154 bp, Protomyxzoa rheumatica
gaatggagtcgaatggaatggaatcgaatggaatggaattacatggaatggaattgaacggaataaaaagaatagaatggaaaggattgtaatggaaagatatcgaatggaatggcatggaatggaatggacttgaatggaatggactggaatg

SEQ ID NO: 1213 - DNA, 130 bp, Protomyxzoa rheumatica
atttgggtcaattgcattccattcaatttgggttcattcctttgcattccattgcactagagtccattgcattccattccattcgagtccattccactttattctgtcctaatactttcgagtccattcc

SEQ ID NO: 1214 - DNA, 122 bp, Protomyxzoa rheumatica
catcacaatcatcattggcaatcatcatcatcaccacaatcatctcaaacatcaccactatcaccacaatcatcacatcaccaccatcacatcatcattcctgttataaccagcatcaccat

SEQ ID NO: 1215 - DNA, 151 bp, Protomyxzoa rheumatica
ccattccattccattccactctattccattccactccattccattccaatccgctaaactccactccatccactccatttcattccacatcactccattccattccattcctttccaatccactctattccattccatttcatttcattcc

SEQ ID NO: 1216 - DNA, 194 bp, Protomyxzoa rheumatica
agtcacgatgaaccacagacctaaaggctaaaccgatcatgcttaaaagaaagaaatttagatgaatatcttcacagcttagggattggagaaagtatcttaggacatgaaaagcaagaacatatgagaaaaatattcataagttagatttcaacgaaaaaaaaaagaaaccagtgctcatgaaaagtcaccat

SEQ ID NO: 1217 - DNA, 148 bp, Protomyxzoa rheumatica
aggaatggaactaaatggagtggaataaaatggaatcgaaaggaatagaatggaatggattgtcatggaaagatagcaaatcgtatggaatggaatggactcgaatggaatggagtggaatggagtggacttgaatgaaatcgactga

SEQ ID NO: 1218 - DNA, 167 bp, Protomyxzoa rheumatica
gctccgtaaagcatttgaagggccgaggaggggacagaccatgctggaaacagggttgatggaggtagctctgcccaggccgcccacaggaaggcttacagggagctgttggggaggaagtgttgattttaacacaaatgagcgacaggaggaggagctgtaaccac

SEQ ID NO: 1219 - DNA, 142 bp, Protomyxzoa rheumatica
attttgttggtactgcattgttttttaagtcttatttttttccctttttatcagatttaaagtggaaaggaagattgatgagatctttaacttttgtgtggatttatttatttatttatttatttacttttttttttttgag

SEQ ID NO: 1220 - DNA, 367 bp, Protomyxzoa rheumatica
agtggagaagagtggagtggagtggaatggaacgaagtgcagtggactgaagtggagagcaaaggaatggattaaagtggaattgaggggagtggaataggaaggagtagagtggaatggtgtggaatggattggaatgcaatgtagtggaatgtagtggagaagagtggaatggaattgagtacagtggattaaaatggaatggagttgattgaaatggaatgtagtggaatggaatgaagtggaggggagtggtgtttagtggagtgtagtggaatggagtggaattgaatggaatggagtggaatggagtggagtgcagtggaagggaattaagtggagtggaatggatggagtggatcggagg

SEQ ID NO: 1221 - DNA, 359 bp, Protomyxzoa rheumatica
gaatggaatcgaatggaatggaccagaatggaatgggatggaatagaatggataagaaagtaatggattacaatgtaattcatttgaatggaatggaagcgaatggaatgtaatcaaacggaatataatagaatgcaatagaatggaatagaatggaacacaatggaacctaacggaatggatacaagtggaatggaatggaatcgaatggagtggagtcgaatggaatggactggaagaaaatggattcatacggataggaatctaacagaaaggaatggaatggaaaggaatcaaaaggaaaggagtcgaatgtaatggaatcgaatgtattggaatttaatggaatcgaaaggaat

SEQ ID NO: 1222 - DNA, 174 bp, Protomyxzoa rheumatica
aaaacaaactttccgcctgcgtccgatgcaatcttctcgcttaataagcgggggctgagaagattatcgccatccagcgagttgtcattcatgctgggtaccttccaggaaatactgggcggaaactccgaggctgagctgtgtattgatgttgcttacgaatacttagcaagg

SEQ ID NO: 1223 - DNA, 211 bp, Protomyxzoa rheumatica
aggtcacacagcttttcagtggaggaatttggatttggatgcacatatgtttccttgatcaaaaagcatagcttccctggccctgtagcctgttctggggcaggagtgcttgagcccctgctcttcatgttatcctaccatcatcagtagtgtaatgctatgttaccttccctccactatcgagagggaagtgggaggtgccaatgtgggg

SEQ ID NO: 1224 - DNA, 124 bp, Protomyxzoa rheumatica
agcaatggagttgagtgtaatggaatggaatggagtggagtaaagtgtagtgtattggagtggagtggaatggagtgatgaggaatgggaaggaatggaatgaactagagtggaagggaatgca

SEQ ID NO: 1225 - DNA, 144 bp, Protomyxzoa rheumatica
tcactctctctctctttctctctctctgtgcctatcttctctccaactctctttctctacccatctgtctctctctctgtctgtccctctccctccctttctgtctctctctctctctcattctctctctgtctctctctcttt

SEQ ID NO: 1226 - DNA, 184 bp, Protomyxzoa rheumatica
catccagtaagtatgaatgggatttcactgtggcttagctttgcatttaccaggttagtacaggagacaatgtgtcctatattcactggtacctcatatttttcttcctgttcagtgtcggctctgatcttttattcatttttctaagacattgatggtcttcttctgattgattgcttcagag

SEQ ID NO: 1227 - DNA, 195 bp, Protomyxzoa rheumatica
ccattccattccattccattccattctattccagtcgggttcattccattccatttgaacccattccattccattcgagtcctttccattccattcctttcgagtccattgcattccattccattctattggaatccattcctttccattccatatgagtccactccattccattctatttcattccattccatt

SEQ ID NO: 1228 - DNA, 199 bp, Protomyxzoa rheumatica
atggagtggaatggaatggaacagaatcgaatggaatggagtcaaatggaatcgaatggaatagaatggaaaagaatggaatcaaatggttttgaatcaaatcgactcaaatcaaatcgaatcatatggaatcgaaaggatttgaattgaatcaaaagaaattgaattgaatcgaatgcaaaaaaatgaaattgaaagg

SEQ ID NO: 1229 - DNA, 146 bp, Protomyxzoa rheumatica
taaaatggaatagaatggaatgtagtggaacgaaatggaatggacgcgaatgtaacggaattgaatggactcgaatggtatacaatggaatggactcaaatctaataaaacggaattgaatagactctaatgttgttgaaaggaaa

SEQ ID NO: 1230 - DNA, 398 bp, Protomyxzoa rheumatica
gagtggagtggaatggagtgcattggagtggaatggaatggaatcgaatcgaatcaaatggagtggaaaggaatggaatttagtggattggaaaggaattgagtggaatggtatggaatggaatggaatggagtagagtggagtggagtcgaatggaaatgagtggaatggtgtggaatggaattgaatggagtggagtagagtggaatggagtggaacgggatgggatgcaatggagtagagtgcagtggagaatattggagtgcagtggaatggcatggaatggaatggaatggaatgtaaaggaactgagttaaatggaatggagtgcaatggaatggagtgcaatggaatggggtggagtggagtggaaaggaatggagtggagtggaatggaa

SEQ ID NO: 1231 - DNA, 147 bp, Protomyxzoa rheumatica
cccactccgttccattccactccaatgtactccactccaccccactctagtccactccacggcactccactccgatccactacactccactccaccacatagtgttccaatccaccccatttcactctaaaacaatccactccactc

SEQ ID NO: 1232 - DNA, 124 bp, Protomyxzoa rheumatica
tgcattccagtttgggtgacagagtgatatcaagtcaaaataaaagaatggaatggaatggagtagaaaggaacggaatggagtggatttgattggagtgaagtggagtggagtggaatggagt

SEQ ID NO: 1233 - DNA, 369 bp, Protomyxzoa rheumatica
attccattccattccattccattcaattccattccactccactcaattctactccactccaatcattcccattccttcccattccattccactccactcacttccactccagtctactccactccgttcaattccattcccctccattacattccaatccattctgctccactcctctccgtttcaccacattacatttgattcacttcaatgccattcgattccatttgattcgaatccattcgattccattgaattccgatctattccatttgatttgattcgattcatttggagtcgattcaattcgagtcgagtcgatttgattcgattccattccattctactccattccattccattccattc

SEQ ID NO: 1234 - DNA, 159 bp, Protomyxzoa rheumatica
ctcgactccactccactccacttctttccattaaattccattccattccactgcactctgatccactccactcatttccactccatttcactccactctgttccgttccattccaatctcttccattccagtccattccattccattccactgaattct

SEQ ID NO: 1235 - DNA, 133 bp, Protomyxzoa rheumatica
atggaatgcaatggagtcaaatggaatagaatctaagggaatgtcatcgaatgcaatggaatgcaacggaatggaatgcaaatgaatggacttgaatggaatccactcaaatgtaatagaatagaatggaatg

SEQ ID NO: 1236 - DNA, 141 bp, Protomyxzoa rheumatica
tccatttctttgccttcaaatccattccattcctctccatgaaattccattccaccacaatcgaaaccacaccatttcacaccactctactcaactccatgccactccactccactccaatccattccattccattccact

SEQ ID NO: 1237 - DNA, 169 bp, Protomyxzoa rheumatica
ttggaatggaatggaatgcagtgggatggaatagaatggatatgaacggaagggagtggagttgcatggagtagaatggtgtgtagtggaaaggagtgcagtggagtgggacggaaaggaatggagtggattggaattgagtcaattccaatagatcggaagagcggtt

SEQ ID NO: 1238 - DNA, 206 bp, Protomyxzoa rheumatica
gaatcgtgtggaatggaatagagttaaatggaatggaaccaaatgacatcaaatttaatcaaatggtatacagtgaactggaaaggagtggcgtggagtgcagtggaacggtctggggtggaatggaattgaatggagtggagtggaatgtactggagtggaatggaatgggaaggagtggaattgaacggagtggagtggagtgg

SEQ ID NO: 1239 - DNA, 128 bp, Protomyxzoa rheumatica
tatttggagccctttgtggcatatgttggaaaaggtaatatcttcaaaaaaaaatacacagaacattcagagcaaattctttgcaatgtttacattcatccctcagtattgaagctttctttgattga

SEQ ID NO: 1240 - DNA, 143 bp, Protomyxzoa rheumatica
gtccactccattccatttctctcctttctttcgacatgatctccctctgtcacacacgctgtagctccatgcaattctattaaacgccattccactccactccacgccacaccactcccctccatgccactccaatctattcc

SEQ ID NO: 1241 - DNA, 142 bp, Protomyxzoa rheumatica
cgattccattctaggatttcattcgattccattcgatgattattccattcaattcctttgatgattccgttcgactccattcgatgatgattccattccattccattccattcaatgttgattgcattcgattccattcgat

SEQ ID NO: 1242 - DNA, 299 bp, Protomyxzoa rheumatica
atggagtggagtgcaagggagtgtaatgaagtggagaggaatggaagggaatggaatggattgtagcggaatggaatggaatggaattgagtggataggactggaatggagtccaatggagtggagtggaatggaaaggagtggaatgaaatggagtggaagggagttgagcggaatggaatgtaaagtattggaaaggaattgagtgtagtttaatggaattgaaccgaatggggtggagtggagttgagtggggtcaaatggaggggaatggaatggaatgtaatggaatggaaggg

SEQ ID NO: 1243 - DNA, 179 bp, Protomyxzoa rheumatica
ttccattccattccattccattccattccattccatttccttccataccactccattccattccaccccactccactccactccactgcactccaaaacactgagttacattcaactccactgcattccaatccattccattctattccactccactccactcaaatccactccattcc

SEQ ID NO: 1244 - DNA, 127 bp, Protomyxzoa rheumatica
catgccattccagtccattccatttggtttcattccgtttgatgtacctccatttgaatcaatttccttctattacatttcatttgattccatttctttcgattccattccattccagtccattcca

SEQ ID NO: 1245 - DNA, 171 bp, Protomyxzoa rheumatica
gaatggaatcgaatggaatcatcgtcgggtggaaacgaatggaatgatcatcgaatggaatgattgaatggaatcagatggtatcataatcgaacggaataaaatagagtcatcaaatgaaatctaatgaaatcatcattgaacagactcaaattgaatcatcatcaaatg

SEQ ID NO: 1246 - DNA, 304 bp, Protomyxzoa rheumatica
atgtttatgttttaaaaatcatttttcaaaaacctgacattttatttttaagggataaaaatattgctaattgcctttatattgatctgtggtttctgaaaaaaaaaatggcatgtgtaattgtcccataaaagcattttaaaagaaatgacaacatgtaaattaaaatctatcccctgaggacatcagcagaagcaataaattgatagtgatgaattttgtttctctcatctcaagtttctagggatatttttcatgctatatcaatgataatgaaaaaaaagaaaattaacatttcaggtta

SEQ ID NO: 1247 - DNA, 145 bp, Protomyxzoa rheumatica
aacagaatgcaatggaatggaatggacccaaaaagaaaaggaattgaataaaatggaaaggaatggattggaatgcaatggaatggaacagaacggtatggaagcgaagggacttgaatggaatagaatggaatggaatggactg

SEQ ID NO: 1248 - DNA, 131 bp, Protomyxzoa rheumatica
ataaatcttcttcatgattccattaaacaatagaacgctacggaaatagatacatattaggaagaaatgtacgtaccgcgaggtccacgaatacatgattcgcctaccatcattgtgtaatctatcgatta

SEQ ID NO: 1249 - DNA, 147 bp, Protomyxzoa rheumatica
ttgttgcctctttatttacttttgttagattccacaaatgaaattattgacacaaagggtaattataatgtaaaatttgtaataataaaacccaatattttcccaaagattgtattactttatttcttactagttgtatataaaaca

SEQ ID NO: 1250 - DNA, 140 bp, Protomyxzoa rheumatica
tcgattcctttccattgtatttcgttaaagtccactccaatccactcctttctattccattccatccctttccattaacttcaactacattccactccactcctctccactccattaaattccactccaccccattccat

SEQ ID NO: 1251 - DNA, 131 bp, Protomyxzoa rheumatica
attccattccattccattccataccattcaatgccattcctttcgattctattccaatcgagtcccttccatttgactccattccccttgagtccattgcattccattccactccaatccactccactcca

SEQ ID NO: 1252 - DNA, 123 bp, Protomyxzoa rheumatica
ctgagtgtggtgtatgtgtgtggggtgtgtgtgtgcacatggtgtgtgtgcagtgtgtttgtgtgcagtgtatgcatgtgcatatggtgtgtgtgcagtgtgtgtggtgtctgtggtgtgtgt

SEQ ID NO: 1253 - DNA, 146 bp, Protomyxzoa rheumatica
cattcctttccagtccacgcctttccattccactctattccactccacactactccattccactgtacccaattccattccattccactccattccacacaactcaactccattccactccactccactccattccattccactcc

SEQ ID NO: 1254 - DNA, 145 bp, Protomyxzoa rheumatica
cttttccactcctctcctttctactcctttccactccatttcatttcccttcactcaaatccactccactgccctccactccattccatttcatgctacttctttccattccatttgactgcagtccattgaactccattccatt

SEQ ID NO: 1255 - DNA, 126 bp, Protomyxzoa rheumatica
aatgctgtgagattaatccacacgtcacaaagccttttcacagataacctccttctagtttttatctggggctattcagtttttgcccagaggcctcagcgggttacaatttgtcccttcgcagat

SEQ ID NO: 1256 - DNA, 254 bp, Protomyxzoa rheumatica
atggaatggaatagaatggaatgaaatgtaattgaattgattggaatggaatagaaatgattcgaatagaatgtactgaaattgagtggaatcatatggaatgaaaaggaatagaatggaatggtatggaatcgaacggaatggaagctaaatgaatggaatttaatgcaatggaatcaaatggaatgaactcgacttgaatgaatccgaatggatctgtcttgaatggaatggaatagaatggaatggaatgg

SEQ ID NO: 1257 - DNA, 126 bp, Protomyxzoa rheumatica
ctttccactccaatccactccactccactgcactcgactgcactccattccactacaatccattccatttcactgcactcccatccactccactgaactactctccactcctctccactgagatcc

SEQ ID NO: 1258 - DNA, 165 bp, Protomyxzoa rheumatica
gaaatggaatggaatggtctcgaatggaatggaatggaatgaaatggaatggacttaaatggaatgtaatggaattcacacgaatggaattgaatagaatgaactcgaatgtaattaaatggaatggaatgaactctaatgaaatataatggaatggactcgaat

SEQ ID NO: 1259 - DNA, 128 bp, Protomyxzoa rheumatica
cattcaatgattccattcaattatattcgatgatatttccatttgatttcattcgacaatgattgcctttgatttcattcaatgattccattcagttccattcgaagatgattccattcgattccatt

SEQ ID NO: 1260 - DNA, 163 bp, Protomyxzoa rheumatica
tcccattccactccattccattccattccactaccttaaattccattccattacattacattccactacactccgttccgttccatatctctcctttccactccactccaatccattcaattccattgcattctattccattccattgcattccattccattc

SEQ ID NO: 1261 - DNA, 130 bp, Protomyxzoa rheumatica
gaatggaatggaatggaatggaatgaaaatgaggggaatggaataaaatggattgtagtggaaaggagtgcagcggaatggaatggaatggaagggagtggactgaaatggataggattggaatggaatg

SEQ ID NO: 1262 - DNA, 250 bp, Protomyxzoa rheumatica
ttccattccattcgagtccattccattccattccattccagtctattccattcgaatccattctgttctattccattccattccataccactccgttctactttattccactccactacactaaattccattatatccaactccattccatgccattccactcctctcctctgcactgcactccacagccctccattccactccatcccattccattctgctccattccactgcaatcccctccacccca

SEQ ID NO: 1263 - DNA, 134 bp, Protomyxzoa rheumatica
atggaatggagtggtgcggaatgtaatggagtggaatggagtggaatggattgcaatgcagtggaatggagtggagtggaaaataatataatgtagtggaaagtagtggaatggagtggagtggaatggaatgg

SEQ ID NO: 1264 - DNA, 253 bp, Protomyxzoa rheumatica
tctcctttccattgccctccactccattcctctccaatccactccaatgcattccaattcattctttccacaggaatccattccgttccgtttctctccactccattccactccattgcattccactccacttcaatccattccgctccattccattctactccactccattccactccattccattccattctatttcatgccattacattgcacttcattccattccaatcctttccgttccattcattcc

SEQ ID NO: 1265 - DNA, 134 bp, Protomyxzoa rheumatica
cctggcatcagggggagggacattgggcttcccatgcatggtgctatgagtcccactgctgggtgggcagcagaagagatgggcagcggcccacacagctcacctcatggggacaagctaatcactccattcca

SEQ ID NO: 1266 - DNA, 261 bp, Protomyxzoa rheumatica
ggaatggaatggaatggaaattaatggaatggaatggaatcgaatgaaatggagtcaaaaggaatggaatcgaatggcaagaaatcgaatgtaatggaatcacaaggaatggatgtgaacggaacggaatggaatggaatcaaaaggaatggaatcgaatggaatggactcgaatggaaatgactcgaatagaatggaattcaacaaaatagaatcaaatgtaatggaatggaatggaaaggaatcgaaacgaaaggaatg

SEQ ID NO: 1267 - DNA, 130 bp, Protomyxzoa rheumatica
ttccacccttccctgcatgtttcccggtgcccgcagagctctgggagcaaagagtcagcctgaaacatctctgaacggatcaacaaagtcatgtaacgcttgtctatgctctgcctacaggggctttgtg

SEQ ID NO: 1268 - DNA, 149 bp, Protomyxzoa rheumatica
atggaatggaatggaatgggtgctgagattgtaccactgtgctacagcctgtgtgacgcagggagatgctgttgaaagaatggtgtggaattttgatgcggtggagtgtagtggaatggagtggaatggagttgagtggagtggaaagg

SEQ ID NO: 1269 - DNA, 166 bp, Protomyxzoa rheumatica
ctttccattccactccattcaactccgttccactccattccattgcactccacttaactccattccactccattccatttctctccattccattgcactccactccattcctctccattccactacaatacattccattactttctttccacagggatcaattcca

SEQ ID NO: 1270 - DNA, 175 bp, Protomyxzoa rheumatica
cggtgacctactaaaagttggaaagacaactgaccccaaacgccgcatccgagaagcaagaacgtggatacccacaatcaagatcgtcgggatcaaaccattttggaatgtaggttcgattgaaaggacgattcatgaaggctgcgctccgtactggcacggcagagagtggttc

SEQ ID NO: 1271 - DNA, 157 bp, Protomyxzoa rheumatica
ctttttctaagtcttcaccatttgctttcatctcaccagaatataactccataaatgctaagcacattctactcctcactcatgttatttctctccttttcgtattttgctattacattaaataatatcctcaaaaatattgtattggcttggtttt

SEQ ID NO: 1272 - DNA, 131 bp, Protomyxzoa rheumatica
cggagcaaggagtaaccgtagatcccaagaagatcgccgccattcaagattggccgcaaccaaccaatgttactgaggtcaaaagcttcttgggtttgccaaaatactatcgaaagtttgtcaaaggattc

SEQ ID NO: 1273 - DNA, 215 bp, Protomyxzoa rheumatica
ttccattccattccattccattcctttccaatgcacaccactccattccattccattccattctattccactccactgcagttctttcaattttgttccagtgctttcctttatgttccattccactccattcctttccactccactcctttccactcctctccatttcactccattccactcctctccatttcactccattccactccattcac

SEQ ID NO: 1274 - DNA, 146 bp, Protomyxzoa rheumatica
tgtgtatgtggtgtctatgatgtatgtaggtgtgtgatgtgtgtggtgtatgtgtgatgtgtgtggtatatgtgatgtatgtggtatgtgcgtctgtgtggtgtgtatgatgtatgcaggtttgtgtgtggtatgtgtggtgtgtg

SEQ ID NO: 1275 - DNA, 261 bp, Protomyxzoa rheumatica
agaatagaattgaatggcatcgaatggaatggaagagaagggaatggaagagaagggaatagaatgcaatggaatcagatggaacagaatggaatggaatggaatctaatggagtagaatcgaatggaatggcatcgaatgttatggaatggaatggattgaaatggtatggactcgaatggaatggactcaaaaggaatagaatagaattgaatggcattgaatggaatggaatagaatggaatgaaatggaatggaata

SEQ ID NO: 1276 - DNA, 164 bp, Protomyxzoa rheumatica
cattccattccattccattccattccgttgcattccattgaactgtactccattccattccattccattgcattgctttccattccattccattccaatccaatccattccattgaattccattccattccactccactccattctattccattccacttgact

SEQ ID NO: 1277 - DNA, 151 bp, Protomyxzoa rheumatica
ccaccccattccaatgcactccactccactccactgcattccattccattcccctccactccactctacagcactgcactgcagttcattccactccattccattcaattccactccactccataacattctacttaactccatcccattc

SEQ ID NO: 1278 - DNA, 357 bp, Protomyxzoa rheumatica
atggaattgagtggactcaaaaagaatggattggaatggaatggaatggagccgaatggaatgaattggaatggactcaaatagaatatgaatggactcaaatagaatggaatggaaaggaatggactctaatgcaatggaaaggactcgagtggaatggaatggaatggactcgaatggaatggaaatgactcgagtggaatggaacagaatgcaaaggactcgaatggaatggagtggaatgtatttgaaaggaatggaatggaattgaatggattcgatttgaagcgaatgcaatggcatggaatggactcgaacggaatgtaatgtaatgagatcggaagagcgtcgtgtagg

SEQ ID NO: 1279 - DNA, 503 bp, Protomyxzoa rheumatica
ttcaaatccactccactctaaacaactccactacattgcattccattccgttccattccactgcaatccactccactgaattccactccactccacctttccattccattccattctattccactacactccactcaaaaccactgcatttcattccactgcagtccatagatttccattccattacactggactccactgcactccagtccactacactccattcaactccactcaactccactacactccattccactccattcctttcctttaaaatccgttccgttccattcaaatccagcccattccacaccgttccagtaaattccactccattccattccattcaattccacgccactccgttccattccattcaactccactacactccactacgctccactctattccaccacactccaatccattccacaccactccattccaatcatttccactcaagtcaattccactccactccagtacattccactcca

SEQ ID NO: 1280 - DNA, 208 bp, Protomyxzoa rheumatica
aatggactggagtgcaatagactcgaatgaaatgctatcgaatggaatggaatttaatggaatggtctgtaatggaatggagtcgtatggattgggttcgaatggaaaggaatcaaatggaatacaatcgaacggaatggaaccaaatggacaggaatcaaactgaatggaatcgaagggaacagaatcgaaaggaatggaatcaaat

SEQ ID NO: 1281 - DNA, 132 bp, Protomyxzoa rheumatica
tccattccattccattctattccattcgactctatttcattcctttgcattcctttctgttccatgccattctatttcagtctattcctttccattccattgctttcatttccatttctttcgagtccattc

SEQ ID NO: 1282 - DNA, 160 bp, Protomyxzoa rheumatica
gaatggacttgaatggaatagaaagggatggaatggaatggaatgaatttaaaaacaatggaatggaatggaatccaatggaatggaaaggccacgaatggaatggaatggaatggaatggactcgaatggagaagattggaatttagtggaatggaatc

SEQ ID NO: 1283 - DNA, 220 bp, Protomyxzoa rheumatica
cccatcccattccattccactccactccattccacttcactccattccattccactccatgccattccattccattccactgaactccactaccctccactcaattgcactccactccacttcattccattccattccattctactctactccactccacgtctctccattccattccactccgtttcattcctttccagttcattccatgccactccat

SEQ ID NO: 1284 - DNA, 292 bp, Protomyxzoa rheumatica
ggaatggaatggagtggagtggagtggagtggaatggaatggattggaatggagtggaatggaaggaaatgggatggaatggggaggagtggaatggattggagtagagtatagtggaatggaatggaatgtaaacaaatggaatagaatggaatggaacagaatactttcgaatggtacgaagtggagaggaatggaacggaatgcaatgcaggggaatggagtggagtggagtggaatggaatggaacgcagtggaatgtagtggaatggaatggagtggaatggagtgg

SEQ ID NO: 1285 - DNA, 230 bp, Protomyxzoa rheumatica
cattcgattccattcgatgatgattccattcaattccatttgatgattccactccattccattcgatgatggtttcatttcattccactcaatgatcctgtttgattccattctataattccgttcgattccattcgaggattccattcgattccattggatgattattccatttgattcccttcgatgattccattcgattccattcgatgttgattccattagtttcc

SEQ ID NO: 1286 - DNA, 190 bp, Protomyxzoa rheumatica
taatagaaagcaatggaatggaatggaatggaatggaagggagtggaatggagtggaatggaatggaatggtgtgaaatgaaaaggaatggaatggaatagaatggattgggaaagaatggaatggagtgcactggcatggaatggagtggaatggagtggagtggagaggagtggaacggagtggaata

SEQ ID NO: 1287 - DNA, 174 bp, Protomyxzoa rheumatica
aatggaatggaatggaatggaatggagtcgaaaggaatgaactggaatggaatgtactcgaatggaatggaatcgattggaatgtaatccaatggattggaatggaaatcaatggaattcaatagaatgcaatgcaaagaaatggaatggagtggaatcgaatggaatggaatc

SEQ ID NO: 1288 - DNA, 262 bp, Protomyxzoa rheumatica
gattccatttcattccactcgattacagtcaattcgattctattccatttgtttccatcaaattctattccattccattcgattacattgcaatcattgccatttcattcgattccattctattcagttccattccattcatgttcattccattagagtccatgtctttcgagtccatttcattctcgtccattccattccagtccattcaattcgcgtccattccattcgagtccattccattcaattccgttccattcca

SEQ ID NO: 1289 - DNA, 142 bp, Protomyxzoa rheumatica
ccacatacaccaaacaccatacacacaccacacacacaacatatataccaaacactacacacaccacacacaccaaacaccacataccacatacacatcacatgctacacaccatacacacaaacaccatgcacacaaaaca

SEQ ID NO: 1290 - DNA, 148 bp, Protomyxzoa rheumatica
ggaatgtagtatagtggaatggagtggagtggcatggaatgtagtggagtggtatttaatggagtgaaaaggaatggagtgaggtggagtggaagggtggggagtggaacggaatggaatggaatcgaatggaatggagtgaagtgga

SEQ ID NO: 1291 - DNA, 160 bp, Protomyxzoa rheumatica
ggagtggaatggaatggaatggaatggagtggggtggaatagaagggaacggagtgtattggaatggaagggaattgaatggagtggagtggagtggaattaaactgaatggagttgaatggagtggagttgcaactgaacgtagtcgagtggaatggaa

SEQ ID NO: 1292 - DNA, 214 bp, Protomyxzoa rheumatica
ccattccaatccattccattccattccatacgactccattccatagcattcgtttccattgcattgcattcctttccattccattgcaatccactccactccactccactctactccatggcattgactcgattccattctgctccactccattccactccactgcactcctccccattcccctccattccactccactccactccactccact

SEQ ID NO: 1293 - DNA, 154 bp, Protomyxzoa rheumatica
aaagtacaaaaaatacatattatattgtgtacataaaatatcaaggtacacaaaatacatattatatactgtatataaaatatcaaatttcacaaaatacatattgtataccacacataagatatcaaagtacactaaatacatattttacact

SEQ ID NO: 1294 - DNA, 190 bp, Protomyxzoa rheumatica
aattctaaggtacatccttgcggatcaatggtaattaaatactggccataatgattactgggtacttgaccaaatccaatcacgaaatcagaatttattgaaagatgggggtgctagatgcgagccacagaagagcaagttaagcgctttaatgaggatgggaattttgacgagcttactcggagtctgt

SEQ ID NO: 1295 - DNA, 180 bp, Protomyxzoa rheumatica
cacagatacacacccaccacacacatcacacatacacaccacatacacacgcacgtacatacaccatacgcaccacacatatacacacaccacacacccaccacacacatcacacataccacatacacacatgcactcacatacatcatatgcaccacacgtatacacacacatcacaca

SEQ ID NO: 1296 - DNA, 149 bp, Protomyxzoa rheumatica
atggaatggaatggaatgcaatggaatgcaatgtagtggagtggatttgaattgaatggagtggattggattggagtggagtggagtggaatggagtggaatggagtgcagtggaaaggaatggagtggagtggaatggaatggagtcg

SEQ ID NO: 1297 - DNA, 284 bp, Protomyxzoa rheumatica
ttgcattccattccattccattccattcgatgaaattccattcgactctattctgtttgactccactccattcaattccattcaatccgactccattccattctattcccttctgatccactccattgcattccattcgtttcaattcccttcgagtccattcaacaccagtccattccattcaagtgcattcctttccagtccattccatttgaatccattccattccattccactccatttaatttgatatctttccattacactccattccattctattcc

SEQ ID NO: 1298 - DNA, 167 bp, Protomyxzoa rheumatica
ccattcgatcccattcaattcaattccattccattcgattccattgcatttcattccattccattccatccatttccattcagttccattccattcgtttccattctattcaatttgattccgtagtattccattccattatgttcaattccattccattcctttcg

SEQ ID NO: 1299 - DNA, 203 bp, Protomyxzoa rheumatica
tggagtggaatggaatggagtgaagtggaatggagtggaatggaagggaatgcaatggaatgtttaaatgaaatgtcagctaagattgtcccactgcacaccagtctggttgacagagtgagatccagtcgaaataaagaaatggaatataacagagtaaaatgcaaaggaatgggaggggggtggaatggaatggagtggaa

SEQ ID NO: 1300 - DNA, 171 bp, Protomyxzoa rheumatica
attgtaatgtaattgattcaaatggcatggaaacgaaaggaatgtaatcaaatataatggaatggaatgcaatggaatggaagagaatggaatgcaatggaatggaaccgagtgtaatcgactgtaatggaatcgaatggaatggaatcgaaaggaatggaatccaatgga

SEQ ID NO: 1301 - DNA, 155 bp, Protomyxzoa rheumatica
gaatggaatggaatggaaaggaatggacttgagtggaatagaatggaaaggaatggaatggactctaatgacgtggaatagaatggaatcaaatggaatggaatggaatctagttgaatttaatggagtagaatggacttgattggaatggagtg

SEQ ID NO: 1302 - DNA, 132 bp, Protomyxzoa rheumatica
cactgtgggcaaatctgtcctctgttatttgggtggatacagtgggggctgggtcaggagagaaaatggaaggaagaaggatgaaacgatagtgccgctgtcttcctgcgttccacacagagcatctgcagt

SEQ ID NO: 1303 - DNA, 205 bp, Protomyxzoa rheumatica
atcgaatggaatgcaatagaagggaatggaatcgaatgtaaaggaatcgaatgaaatgcagacgaaaggaatggaatcaaatgaaaggaatcaaacagaagagaatcgaatgtaatggaatctaatggaatggaatgcaaggcaatggaaaggaaagaaatggaactgaatggaatggaatggaatggaaaggaatggaatggaa

SEQ ID NO: 1304 - DNA, 148 bp, Protomyxzoa rheumatica
gaagggagtgtaatggaaagatgtcaaatggaatggaatggactcaaatgtaatggccaggaatggaatggactcgaatggaatggattggagtggaatggacacgaatggaaaggaaacgaattgaatagaatggaatggaatagaa

SEQ ID NO: 1305 - DNA, 132 bp, Protomyxzoa rheumatica
tatgtatgtatgtatatacgtatggtgtgtgtctacatgtatctgtgctgtgctgtggtgtggtgtgtagtatgtgtatgtgtggtgcatatgtgtggtgtgtgtgtaggtggtgtatgtgtatgtgcatgt

SEQ ID NO: 1306 - DNA, 153 bp, Protomyxzoa rheumatica
gttccattccattctattcgggttaattccattgcattccattgcgatcgagttgattccattccactccattccattcaattcaattccattccagtctttccattcctttccactcgggttgactccattccattgcattccattccattc

SEQ ID NO: 1307 - DNA, 212 bp, Protomyxzoa rheumatica
tgcagtggagagaagaagaatggaatagcatggaatggagtgaaatatagtggaatggagtcgaaagtaatggaatggagtggagtagaatggaatggatttgaaaagaatggaatggagtggactggaaaggagagaagtggtatggagtggagtggagtagagtggagtggagtagaatggaatggagtggaatggaatggaatgcaaag

SEQ ID NO: 1308 - DNA, 162 bp, Protomyxzoa rheumatica
cactccattccattacactccatttcatttaactccattcaattcattttcttccattatgttccactgaattccacctcaataaactccactcccctccacttcatgtcactcaattccactcaactctactcatttccactccactccactccattccat

SEQ ID NO: 1309 - DNA, 129 bp, Protomyxzoa rheumatica
aatgcaatggaatggaatggaatggagttgaatcgagtggaatggtatcaaatagaatggaatggaaattaatggaatggactcgaaaggaatagaatctaatgtaatggcatggaatggaatggaatg

SEQ ID NO: 1310 - DNA, 143 bp, Protomyxzoa rheumatica
gaagtccagtgctctgcatgcaatattctccatcctgcacattcagcatctcctacgtaagagatctgggtgcttagggaagcaacttccacctgtgccatcagtaccagcagggaatagcgagacattaagcacccagatct

SEQ ID NO: 1311 - DNA, 130 bp, Protomyxzoa rheumatica
cgatgtcttctgcgacgcgaaggtcactggcaacgcgtgcaaatgggacaataacatcctcatagaaggaatggttggcatgaatgtcaccaagcggcgttatacgtagacgaggctccataacctccca

SEQ ID NO: 1312 - DNA, 175 bp, Protomyxzoa rheumatica
aaatggaatggaatggaaagaaatggactcgagaggaatgggatggaatggaatggaatgaaatggaatggaattgaatataatttaatggattggaatggaatggaatgaaatcgaatgcaatggaatgtactcgaatggaatggaatggaaaggactcaaatggaatagaatg

SEQ ID NO: 1313 - DNA, 311 bp, Protomyxzoa rheumatica
gagtggaatggaatgaaagtggatggaatggaatggggtggattggagtagagtggaataaaatggagtagagtcttgtagagttgattgaagtggagtggaatggagtgggaaggaatggaatggagtggggtggagaggattggagtggaatggaatggagtgtagtgaaatggagtggagtgggttggaaaggagtggagtggagtggaatggagtacagtagaatggaatggagaggagtgaaatagactggagtggagtggaaaggagtggattggattggaatggagtggggtggaatggagcag

SEQ ID NO: 1314 - DNA, 211 bp, Protomyxzoa rheumatica
cattcatttcattcatgtccattccattctatttcattcctttcaagtccttttcattccattccattccattcaattccactcctttccattccattaaattgcattccattcctttccatttctttcaggtcctttcaattcagctgcattccattcgagtccattccattccattcaatcccattcgagtccattccattaaattccg

SEQ ID NO: 1315 - DNA, 132 bp, Protomyxzoa rheumatica
tgatcaaagaagcaaagcctggaatactgtgtgacatgctctcagtggtgatgatcgcagaattcaagctgggagtactgtgtgatatggtctcagtggtcatgactgaaaacgggaagctgggagtactgt

SEQ ID NO: 1316 - DNA, 172 bp, Protomyxzoa rheumatica
aaaaggtaatgtaaatgtacaaaacaccacttagcaaggatacttacacatttatagtgcatagcatatgagcatgacggcctctggaaaatggagttgaaacaggaatagggtattggaaataaatgggactttgcatggattgatgctgctgtctcaaactataaataaa

SEQ ID NO: 1317 - DNA, 122 bp, Protomyxzoa rheumatica
atgccattccattccattcctttcaatgccatacaattcgattctattccattcgaggacattgcattcgagtccaattaattttaatccattccattccattccattccatttgatgccat

SEQ ID NO: 1318 - DNA, 136 bp, Protomyxzoa rheumatica
ggcaatgcatcagaggcgtacagaacggcgtatgtcgtcaagccaaagacgaaacctgaaaccatctggcaggagtcatcacgcttactagccaaccccaaggtttccgcaagggtgaaagaactgcaggaagagg

SEQ ID NO: 1319 - DNA, 179 bp, Protomyxzoa rheumatica
aaaagtaaaattggcccagctcctaaggagccctttcaagatcccctgccttcagaacttaatggatcaagcagctccctggtatacagcttgcactcagataaacgaccagcaaggccctaaacccagccgaggccactgcctccagggaggctcaccaagaaaaaggtaggaaattg

SEQ ID NO: 1320 - DNA, 157 bp, Protomyxzoa rheumatica
ggaaagaacgtgctgatcgcggacgacatcatgtcgtcgggagcgtcgctttctgccatgatcgatctgctgacggtgaagacgaattgcaaaatcgatagggcagcgtgtttcctcagcgggttgtagttcccgtaagtataggaaatttcgctga

SEQ ID NO: 1321 - DNA, 142 bp, Protomyxzoa rheumatica
cgcgaacagaccatccgaaccgcccgcgacgagacactcagcctggtcctcgtcgaagacaagaccatgctcgcagccggtagaggttgaggcaaaaagaaaagcccgtcatcgctgacgggcttcccttatacctgccacc

SEQ ID NO: 1322 - DNA, 122 bp, Protomyxzoa rheumatica
atcatctcatctcatctcatcatttcatctcatcattcatctcatttcatatcattttatctcatctcatttcatctcatttcatcattacatttcatctcattttatgtcatcatttcatg

SEQ ID NO: 1323 - DNA, 166 bp, Protomyxzoa rheumatica
tgcattccattccactccactccattctactccactccactccattcggttccattgcacaccactacattccaatccactccattccattccactctatttcactgtactccataccattccattccattgcactccacttcactgtactccactccactccaca

SEQ ID NO: 1324 - DNA, 131 bp, Protomyxzoa rheumatica
gaaacttctttctgatgtgtgcttccaacacacagagttgaaccttcctatccttagagcagttatgaaactctcttattgtagaatttccaagtggatagaaaaattggacagaatcattctcagaaact

SEQ ID NO: 1325 - DNA, 147 bp, Protomyxzoa rheumatica
gcttgaggtggagtggagtggaatggaaaggattgaaatgaagtgcagtggagtggagtggagtgtagctgaatggaatggaatggcatagaggagtggagtggagtggaattgactggagtggagtgcagtggaatggaatggaat

SEQ ID NO: 1326 - DNA, 191 bp, Protomyxzoa rheumatica
ggaatgcaatggaatggaaataacccgcgtgaaatcgaatggaatggaagggagtggagggaaacggtattgaaaagaatggaatggaatggaaagggatcaacccgaaaggaatggaatgcaatggaatggaatggaatagaacggaatagaatcaacctgaatggaatggaattgaatggaatggaatg

SEQ ID NO: 1327 - DNA, 245 bp, Protomyxzoa rheumatica
cattccattccatttcattgaattaaatttgattcaattccattccatttcattctattcccatccttaccattccattcgattacatccccttgtattccattccattcaattcgatcccattccatttgattccattccattcatttcaattccttctgtttccattccatttgagtcctttccattgtagtccattgtattccattccattccattttactccattccattccattcaattc

SEQ ID NO: 1328 - DNA, 144 bp, Protomyxzoa rheumatica
tggaatggagtggaatggaacagagtggaatggagtggagaggaatgtaatggaaaggaaatggactggaatgaaatggaatgtaacggaggagaatttaaaggagtgtagtgaagtgatatggaatggattggagtggaaagg

SEQ ID NO: 1329 - DNA, 144 bp, Protomyxzoa rheumatica
atgcgaatgcaatggaatggaatggaatcgactcgagtggaatggaatggaatggaatgaaatgtactcgaacttaatggaatggaattgaatggacgtgaatggaatggaatggaattgaaccaagagaaatggaatggaatg

SEQ ID NO: 1330 - DNA, 171 bp, Protomyxzoa rheumatica
tcaattcgtgtccattcaattccattccattcttttccgttccattcgattcctatccattggattctgttatgttccagtccattccattcgagtccattccattccagtcccttccattcgattccattgcattcgaatccattccactgaattccactccattccatt

SEQ ID NO: 1331 - DNA, 138 bp, Protomyxzoa rheumatica
gaatgtaatgcaatggaatggaatagactggaatggaatgtaattgaatgcaatgtaatcaaatgtaatggaaaggaatgccatggaatggaatagaatggaatgcaatgcaaaggtatagaatggaatgcaatggaa

SEQ ID NO: 1332 - DNA, 146 bp, Protomyxzoa rheumatica
gaaattacaaaatacaaaactattttttggtagaaaaatacaaaactttattaaattttttaaaattttattcccttttattttattttggagaacaggtgtaatttactactttttgtaacaggttttagtttacttcttttttt

SEQ ID NO: 1333 - DNA, 137 bp, Protomyxzoa rheumatica
ggaatggagtgaaatggagcggcgtggagtggagtggtgtgcaatagaatggagtggaatggaatggaatgcaacggattacagtggagaggagttgatggagttgatcggagtgcattggaatggaatggaatgga

SEQ ID NO: 1334 - DNA, 301 bp, Protomyxzoa rheumatica
attccattccattccactccactccattccattccattcctttcctctccactctaatccattccaatacactgcatttcactccacttccttccattccattcctttccactccattccattccactgcaatcctttccattccactcgtctccattccattccactcgtctctattcccctcctttccatttcactccactgtactccattctattccaatcgtcttcattccagtccactccagtctattccactgctctccatcactctccaatgctttccattccattccattcca

SEQ ID NO: 1335 - DNA, 220 bp, Protomyxzoa rheumatica
cgggtggtcgcagccagtaaaccaatccagaagttgtacttcactgcacccagaatcaccatgaactcgcccacaaaaccactggtggctggaagacccgagttggccattgcaaacaacaggaaaaacgctgcaaatttgggcatggtgttcacaacgccaccatatgcagaaatttcacggctgtgaacgcggtcgtaaagtacaccaatacacagga

SEQ ID NO: 1336 - DNA, 172 bp, Protomyxzoa rheumatica
gaatggaatgcaatagcatggaatggaatcgaacggaatggaattgaatggaatggacaggaatggaatggactgaaacagaacgtactcaaatgtgatagattgcaatgtaattgattgaaatgtaatggaatctaattgaaagtaatcaaatggaatggaatggaatgca

SEQ ID NO: 1337 - DNA, 128 bp, Protomyxzoa rheumatica
taacttcctaaggatagtctgattaccaaaactgatcccattagagttagaaagcttaaactgatgatttcccagaagaaacagaaagagttattaagtaactacccacaagcccaaggaccagacgg

SEQ ID NO: 1338 - DNA, 126 bp, Protomyxzoa rheumatica
cattcactcactcactcattcacttgttcacttattcacttgctcactcactcactcactctcttattttttcattcacccattcactcactcactcattcagtcgttcactcactcattcactct

SEQ ID NO: 1339 - DNA, 208 bp, Protomyxzoa rheumatica
gagaagagcggaatggaatggaacagagtagaatgtagtggagtagaatggattggaatgaagaggtttgcagtagagtggagtgcagtggaattgaatgcagttgaaatgattggagtggaaaggagtggcatgaaatagaatgcagtggcttttaatgcaatagagattaacggaatggaaaggaatagagtgtagtggagtggaa

SEQ ID NO: 1340 - DNA, 153 bp, Protomyxzoa rheumatica
cattccactccattccattccactccactccattccattcaactcaactcccttagactccactccactccattcctctcccctgaactccattccactctacacatctccactccactccattccattcccctctattccattccctaccat

SEQ ID NO: 1341 - DNA, 198 bp, Protomyxzoa rheumatica
tgaatcactcatgcattaatgagggaaaattgtttgacaattctttataaaataaaacatttaattagcaatgacccagaaacccttggacatttatcccagagaaataaaacttgcattcacaacaaacaaacaaaacatctgtacaataatattcacactatctttatttgtcatagctgaaacctggaaacagct

SEQ ID NO: 1342 - DNA, 226 bp, Protomyxzoa rheumatica
tggaatggaataaaatgcaatgcagttgaaaggaatggaatggagtacactgcaatggaatgcaatgcaatggaattgaatgaaacggaatggaatgacatggaaaggagtggattggaatggaatgcagtggagtggattggaatgaaatggagtgaaatggaatcgattggagtagaatggaacggaatggaatggagtggaatggagtggaatgcaatggaat

SEQ ID NO: 1343 - DNA, 189 bp, Protomyxzoa rheumatica
gtcctctctattccattccattctattccattccattactctccactcgaatccattcctttccacaccactcacttctattcaatttcgttcaattactttccattccattccattccatttaattcctttccattccacttcactccattccattccattgcattccactccattccactccattcc

SEQ ID NO: 1344 - DNA, 128 bp, Protomyxzoa rheumatica
tgatctcattataatgcttttactttatgatgggtttctttttggacaaatgagcagcttttgtatgcttttgattttttgcatttcactcaacttttttgtcttctctcttttctttgttcctctcc

SEQ ID NO: 1345 - DNA, 249 bp, Protomyxzoa rheumatica
attccattccattccattccattaaattccattccattccattcgaggccattccatttcattttattccattcgattccattccattcgagtccattccattccattccattcccttccattcgatggcattccatttgattctattccattcggctccattttattccattctcttccatctgattccattccatgctattcctttttattccattccattccattctattcctttccattccattc

SEQ ID NO: 1346 - DNA, 134 bp, Protomyxzoa rheumatica
tggagaggaatggagtgcagtggaatggagttgagtggaatggaatggattttagtggaatggaagggagtgaaatttaatggtgtggagtggagtgtattggtgtggaatggcatggaatggaatggaatgga

SEQ ID NO: 1347 - DNA, 144 bp, Protomyxzoa rheumatica
cgtatagagtatatatgtatgtataatacacatgtatgcatgcatatatgcgtgtatatatacacatgtatgcatgcatatatgcatgtatatatacacatgtgtacatgcatatatgtatgtatatacacacatacacgtata

SEQ ID NO: 1348 - DNA, 214 bp, Protomyxzoa rheumatica
gaatggaatggaatggaatggaatggaatggaatgtaaagactcgaatggaatgaaattgagttgaatgaaagccaatggaatggaatggaatggactccaatataatggactggaacggtatgcactcaaatggaatggactcgagtgcaatggaatcgaatggaacgtaattcaatggaatgaaatggaatggaatggaatggaatggaatg

SEQ ID NO: 1349 - DNA, 186 bp, Protomyxzoa rheumatica
cactccactccattcaattccgttccttcccattccattcaattccatacctccccattccattccattcccctccattgcagtccactcccctccactgcattcaattcaattcaacccccttccttcctctccattccactacagtccacttcaccacataacattggattcctttcgatgtca

SEQ ID NO: 1350 - DNA, 129 bp, Protomyxzoa rheumatica
tgcagtccaattcaatcgtcaacgaatggaatcgaatggaatcaatcatcgaatgcgatcaaatggaattatcattgaatggaattgaagggaatcagcgaaaggaatcaaactgaattgtcaaatgga

SEQ ID NO: 1351 - DNA, 281 bp, Protomyxzoa rheumatica
ccactccactccactccattccattccattccactccactgcactccgatccacaccattcaactccactccactccaatatgttccattccattccttttcattccataccgttccgtgcctttccactccattctattccaatccactccattccactcctctccactccgattcaccgcaatccattccatgccatttgattacattccattcaattccgttctaatccattcaattacattcccttccattccattccattccattccattccattc

SEQ ID NO: 1352 - DNA, 151 bp, Protomyxzoa rheumatica
aatcaaatggaatgcaatagaagggaatacaatggaatagaatggaatggaatggaatggacttgaagcgaataaactcaaatgaatggaatagaagagaatagaatggaaaggaatggaatggactcgaatggaatagaatggagtggaa

SEQ ID NO: 1353 - DNA, 171 bp, Protomyxzoa rheumatica
gctggtggatggtcttttcgtgatggcatttgactggcaaaacatgttgatggttttggcaattgcctcgctggccataggcaacctcaccgcgattgcacaaaccagcttgaaacgcatgttggcgtattcaaccattgcgcaaatgggcttcatgttgctgggtttcct

SEQ ID NO: 1354 - DNA, 196 bp, Protomyxzoa rheumatica
agagtggaatggagtggaatgagtggagtggaatggaatggaatcgaattaagcgggatgtaatggaatagaatgcattgaaatggaatggataggacgggactggaatggaattgagaggagaaaatcagaattgaatagcattgaatggagtggaatgcagtgcattggggtggagtggaatggaacggaatgg

SEQ ID NO: 1355 - DNA, 124 bp, Protomyxzoa rheumatica
ttaaattttgttgttattttatatatgaatcttgccttttgagcttttgtaagaaaacatataaagaaactttataattttgtaaagttataaatatttttccatcttttaacaattttaaatt

SEQ ID NO: 1356 - DNA, 125 bp, Protomyxzoa rheumatica
tctgcaaaaaggtgaaatgcaagaggcagtttaagatagctcttccacacagagttggaacattttcaacccagagtgtgacttccccgcagccctggcccaggccctctcacaaggaggaggcc

SEQ ID NO: 1357 - DNA, 303 bp, Protomyxzoa rheumatica
tatgcaaatacatacacacccaacacacatgccccacacaaatacacaatcacataccacacaaataatatactcaacacaccacacaaaaacacatgccccacaaatacacaatcacacacaccacaaatacacacatattcaacataaactacacacacaatacacaaataacaccacacacagaagccacaaatactcaacacaccacagatgcaagccccacacaaatgcacaattacaccacatacacattcaacacatcacacacatataatcacacaccacacagatacactcaac

SEQ ID NO: 1358 - DNA, 153 bp, Protomyxzoa rheumatica
gacgggactgggcaggctcacagctcctctggtgtctgtaggaggccagatttgacccgggtcagctccaactcccaccacagccactccagcttccagacactctgaaagcaaacactggtatcccagatgggaggcaggaagtggggtctc

SEQ ID NO: 1359 - DNA, 131 bp, Protomyxzoa rheumatica
accacacacatcacacagatacacagcaaacacatcacacctacacaccacacacatcacacacagataccacacacatcacgcctacacaccacatacacacacatcacagatacacaacacacacatca

SEQ ID NO: 1360 - DNA, 138 bp, Protomyxzoa rheumatica
atggaatggaatttaatgaaatggactagaatgtaatggacttcagtggaacggactcgaattgaatagaaacaaatggaatgcaatggagtgaaagcaaatgaaatggaaaggaatagaatggaatgcaatcacacg

SEQ ID NO: 1361 - DNA, 208 bp, Protomyxzoa rheumatica
gaatggtatggaacagaatggagtggaatggagtgcagtgaagtggagtggagtggagtggaaaggaatggagtggaatggagttgaatggagtgcagtggagtggagaggagtggaatggagttgaattgaattggaggtaatgcaacgtagtgaagtggaacggattggaatggaatggaacggaacggaatggaatggaatggaa

SEQ ID NO: 1362 - DNA, 190 bp, Protomyxzoa rheumatica
cactccattccattccacttcgttacattccagtccactccacaccagtccattccattcttctccactgcattccactccattgcattccactatattgctctccattcaattccactccattacacacccctaaactccactccattacattccactccactctattccattccattccattccattc

SEQ ID NO: 1363 - DNA, 128 bp, Protomyxzoa rheumatica
ccacttcagtccattccattccaccccaggccattccactccactccagtcgattaaattccagtccatttcattccaccccactccattcccttttattagagaccattccgttccattccactcca

SEQ ID NO: 1364 - DNA, 196 bp, Protomyxzoa rheumatica
ccattccattccattacactgcataccatcccactccactccctgccattccactcctttccactgcttttcactccattccattccgttcaattccattccattcaatcccattgcattcaattccattaaattcaattccgttccattcgagtccattcatttccatttcattcctttccattcatttccaact

SEQ ID NO: 1365 - DNA, 125 bp, Protomyxzoa rheumatica
cattcttgtttaatatacatatattttaaatgaaacaaacttttaaactaaaataatacctatttatcctagggcaagcaagaagtcagagctctaattcactgctgtgtccccagctccaataa

SEQ ID NO: 1366 - DNA, 127 bp, Protomyxzoa rheumatica
ggagtggaatggagtggagtggagtggaattgtgtggaatggaaatgagtggagtggaatggaatggaatgaaatggagtgagtggaatggagtggaatccagtttagtggaatggagtggaatgca

SEQ ID NO: 1367 - DNA, 269 bp, Protomyxzoa rheumatica
ctacgcttcctagtgcgagtagcagccgcgaatttagaaagcggaaaagacgaaaatttctcgatgttaatccacacgagcgggaagaaggttgatcacaaactcgataagaaacccttagacgatgtcctcaacgctctatccaacatccactgccaaaaattcgaaagctatgcgacacaaattcagtccatcgcgacgaaattgttcggagcagcacggtcagaacgaattttgaattacattgtgagcagaagcgggcagaacac

SEQ ID NO: 1368 - DNA, 151 bp, Protomyxzoa rheumatica
ggaatggaatggaatggaatgaaatggaattcaatggaatcaaaccgagtggaatggaacggtatggaaggcaatggaatgcagaggaacagaacggaatggaatggaatggaattgattgagtccgagtggaaatgaatggaagggaatg

SEQ ID NO: 1369 - DNA, 122 bp, Protomyxzoa rheumatica
gtgtatgtgggcgaggtgtgtggtatgtgtgtgttgtgtgtggtttgtggtgcgtgtgtggtgtgtgtgtggtttgcgtgtggtgtgtatgtggtatgtggtatgtgtgtgatctgtgtgtg

SEQ ID NO: 1370 - DNA, 125 bp, Protomyxzoa rheumatica
atttgaatgaattccattcgagaccattccctttcagtccattgtatttgattccattctaagcgagtccattgcatttgggtgtattccattccattccattccattaaattccattccattcc

SEQ ID NO: 1371 - DNA, 123 bp, Protomyxzoa rheumatica
agacaagaaaaaaaatcaaaatacttatccccaaaatatatttcattgccatatctcgaaatggccctggaaggccgttctttgtggggggaaattcacatctgcagagaatctgtattcaca

SEQ ID NO: 1372 - DNA, 129 bp, Protomyxzoa rheumatica
atcctggagtagtctaatttaagacttaaaggacaaacaggaattaggcaggtagaatggaatggagtgggtgcaaggcatttcaggcagaggggataaataatatcttcaaggggctggaggcaagag

SEQ ID NO: 1373 - DNA, 187 bp, Protomyxzoa rheumatica
tccactaagttcaattccgttcccttccattctgttccgttccattccatacctgaccattctattccactccactcaattccacctcactccatttctctgcattacactccattccattccactccactgtactccactcccctccactccgttccatcgcattccattccactctgttccattc

SEQ ID NO: 1374 - DNA, 145 bp, Protomyxzoa rheumatica
ccattcaattccatttcattcctttccattccattccattcgagtacattccattccattcgagtccattccattcctttccattccaatccattgcattctattccactcaaatcgagtccattccattccattccattccact

SEQ ID NO: 1375 - DNA, 216 bp, Protomyxzoa rheumatica
aacacacaccacacatacaacaccacatgggacacacaacataaacatctcacacaccaaacacacatccttcatatcatatgtctatacacacataccacacatacatcaaataccacacacagaacacacatacccacacatgcccaccacacacaccacaggtacatgcacaccatgtatcaaaaacagacacatactcatacaccatataca

SEQ ID NO: 1376 - DNA, 127 bp, Protomyxzoa rheumatica
atggacgcaaatggaatggaatggaatggacaagaaagtacagtaatttaatgtaatggaatggtttggaatggaatggacaagacagtattgtaatttaatttaatggaatggtttggaatggaat

SEQ ID NO: 1377 - DNA, 145 bp, Protomyxzoa rheumatica
tggaggcgattgaaggcgcagggctccgagagattttcgtaggtttcttagctctcgaatatggtgctctttttggcgaagttcctttgcttggtaatcgccatggcgcgccgatcgaattccggcaaatcggcgacaattttct

SEQ ID NO: 1378 - DNA, 131 bp, Protomyxzoa rheumatica
gaatggaatgaaacgaagtggaatttaatggagtttagtggaatggagagagtgtaattgattggagtcgagtagattggaatggagtagagtggattggaatggaatggggtcgaatggaatggagggga

SEQ ID NO: 1379 - DNA, 167 bp, Protomyxzoa rheumatica
ggagtggagtggggtcgagtggaatagaatggaatggagaggaattgaatggatttaactggaatggagtggaataatgtgcatttgaatggaatggagaggaatggataggagtgcaatgcactggaatggagtggggtagtatgaaatggagtggaatggagtgg

SEQ ID NO: 1380 - DNA, 138 bp, Protomyxzoa rheumatica
gatttcactcacagactcactaactcacgatctcatgatctcactcactgactcactcacgatctcactcactcagactcacgatctcactcaccatctcacagactcacgatctcactcacagactcacgatctcac

SEQ ID NO: 1381 - DNA, 127 bp, Protomyxzoa rheumatica
atggaatggaatggagtggagtggagttgaatacaatggaatggtgtggtatggaatggaatagagtggaatagaatataatggagggaagtggaatgtaatgtaatgtaacgtaacggaaagaatg

SEQ ID NO: 1382 - DNA, 169 bp, Protomyxzoa rheumatica
tggaatggactcgaatggaatggaaacgaatgtaatgtagtgtaatgtaatggaatggaatggaaaggaatagacaggaaaggaattggatggaatggaatggaaagaaatgagttgattggaatagaatcgtattgaatggcatggaatggaatggaatggaatgaaa

SEQ ID NO: 1383 - DNA, 338 bp, Protomyxzoa rheumatica
tccattgcattcctttccgttgcattgcattccattccattccatttcattccttaccattccattatacttgggttgattctattccattccattacattagattacattccactcgggttgataccattccattcctatccattccattccattccattccacctgtgttgattccattcaacgccattccattccgttcgattccattcccttccgttgcattctactcgggtttattccattccattccattccattccggtccattaaactcagttccactctggttgattctattccattccattccattccaatccattcctttccattcc

SEQ ID NO: 1384 - DNA, 145 bp, Protomyxzoa rheumatica
aacgggtgaagaggtgcccattttgcctcgccgggtcatgacgttcaaggcgtccaatgtgctcaaacagcgcattttgcgctcgcatcaggcacgcaagaagaaatctgcatagcggatttatgcagggcgcttcggctccctg

SEQ ID NO: 1385 - DNA, 130 bp, Protomyxzoa rheumatica
gctttgcacagccttttcattcagcttgccggtttttaccaggcctttgccaaggccgcagagaatcttttcgttgaaaaggacggtcggcgaacgggtaaccccctcatagacgaccagacgtacagag

SEQ ID NO: 1386 - DNA, 129 bp, Protomyxzoa rheumatica
agtggagtaaaatggagtggactgtagtaaaatggagtggattggagttgagtgaaatggaatggaatagaatgcacgggaattgaatttaatagaatatagaggaatggagtgtagtgtagtgtaatg

SEQ ID NO: 1387 - DNA, 136 bp, Protomyxzoa rheumatica
caagccaccgaggggcatagactctctcgacgtcgaattgatcaatcccaaacttcagactcttcgccatggcggactgcaactcaaacatcttttgctgtgttagttggatgccaacttgcgattggaaaaatgc

SEQ ID NO: 1388 - DNA, 126 bp, Protomyxzoa rheumatica
gagtataaaatatatatttggggtacattgatattttatgaacagtacagaatcaatatttgatgtactttcatattatatgtacctaatatagtatatatttgaagtaatttcatattttatgta

SEQ ID NO: 1389 - DNA, 270 bp, Protomyxzoa rheumatica
tattccactccacttcattccattccactccattccactctactgcattccattatactccattccactccactccaatccattcctctccactctattccattctattccattccaatccattccattccaatcaacaacactccagtccactccattctattccactgaattgtatcccactccactctactccactccactctattgaattccattccatggcactccactctactccacaatactccactccgttcaaatccattc

SEQ ID NO: 1390 - DNA, 143 bp, Protomyxzoa rheumatica
ggaaggaatgcaattgaacggagtggagagggatggagtggagtagatagattggagtggagtggactggactggagtggagaggaatggagtggaatggaatggtgtggaatggtgtggattgtaatggaatggaatggaat

SEQ ID NO: 1391 - DNA, 140 bp, Protomyxzoa rheumatica
cgttcatgggttgataggtgcttacgtgtagaagtccgcttagggcggttagagttacaggagacggggcttaggctcttatccaattggcgcgagggtatagccctccaagtgtgggaacaggctatggcaaagcttac

SEQ ID NO: 1392 - DNA, 138 bp, Protomyxzoa rheumatica
tccatttcattccattccactctactccactccactccaattcattccagttcacccaattccattccactctacattcccttccactccactacattccactccactctattgcattccattccactctattccatt

SEQ ID NO: 1393 - DNA, 132 bp, Protomyxzoa rheumatica
tggagtggacggtattggaatggagtggaaaggaatgcagtagagtggaatggaatggaatgacatgaaatgcattggagtggaataaaatggagtggagaggaatacaatggagtggattggagtggaatc

SEQ ID NO: 1394 - DNA, 245 bp, Protomyxzoa rheumatica
agtatatctgacaaaaatccagaaataaatccatttcacaaatgtcaaagtatttacaaataaatataaccaagaagttgaaggatctgtacatcaataactgtaaaatattaatgaaagcaattataggagacacaaataaaacaaaaatatgttgtgttcctgaaaaaggtttgtttaaacatccatagtgcccagagtgatatacagattcaaatcagtctctatcaaaatttcaatagcat

SEQ ID NO: 1395 - DNA, 132 bp, Protomyxzoa rheumatica
acaatcaaattcccaggtctctctcataggggctttgtaggtaaaagtgaaaagtgattcaaacatatgtgagttcaaagtgaattgtataaatcatgacaaggtaggagaaaggtgtgttacatagtagga

SEQ ID NO: 1396 - DNA, 180 bp, Protomyxzoa rheumatica
attccattccattcttttccattccattccattccatttgaacccaatgaattccactgcattcaattgaagtccattccattccattcgggtccattcccttcaattccattcgtgtcaattccattccattccattcgagtccattccattctattcaattccattagagtccattca

SEQ ID NO: 1397 - DNA, 138 bp, Protomyxzoa rheumatica
aatccgatagcgtctattgaaaaagtagctccatcattagctccgtagagcgccaatgaccaattgcagctgcgtggcagcatattctctataatacaggaaagcgctgataaacgggaaataatatgcgcatctcgc

SEQ ID NO: 1398 - DNA, 187 bp, Protomyxzoa rheumatica
aacggaatggaatgcagggtaatggagtggagtgggggggaggggaatggaatggaatgcaatgcaatggaattgaatggaatggagtgaattggaacgtaatggtgtgaagttgaggggaattgaatgtaatggaatggaatggaattgattggaatggagaggaagggagtggagtggaatgaaa

SEQ ID NO: 1399 - DNA, 125 bp, Protomyxzoa rheumatica
aatggaatggcatggaatggaatggagtgaaatggattggaatgggatgggcccaaagtaatggactaaaataaaagagactcaaatagaatgaattgtaaagaaacggtctcgaatgtaattta

SEQ ID NO: 1400 - DNA, 140 bp, Protomyxzoa rheumatica
ttcctttccgtactgttccattccgatccaatcctccccattccattccactccactcatttcctctccattccatttcactccattccactatagtccactccaatccactccactccactcgactccattccattcca

SEQ ID NO: 1401 - DNA, 128 bp, Protomyxzoa rheumatica
tggtgttggtaatggtgatggtggtgatggtagtgttggtgttggtaatcatgatggtgataatgagagtggtgatagtggtgttggtaatggtgttggtaatagtggtggtgatggtgttggtaatg

SEQ ID NO: 1402 - DNA, 164 bp, Protomyxzoa rheumatica
gaactatcgaagatctaatccgaatatgcgcctaagaatggggaaggagttgggaggaaaatctgccatttattaaattttcgtacaacaatagctaccattctagtattgatatgtcaccgttcgaggccatgtatggaaaaccgtgtagaactccattatgc

SEQ ID NO: 1403 - DNA, 135 bp, Protomyxzoa rheumatica
ggggactccatgctggtgcaacattgcaaacggccaaaaagctactggaagcgccttttagcaagctcgagctgccaatttgacaagggttgctaaattcaaatcaccttcaagcaaatagaagcagctgctttg

SEQ ID NO: 1404 - DNA, 129 bp, Protomyxzoa rheumatica
gaaaaagtcgtgatttcttctgtatgttgaagccacagacataaaactatgtaaataattttagtataaagtgatatataccataatgaaggttttataccttagcctatactgtaaaataagtttatg

SEQ ID NO: 1405 - DNA, 122 bp, Protomyxzoa rheumatica
ccattccattcctttccattcccctccattccgctcatctcccatccactcaactccactccactggagtccattccattccactcaacaccatttatctcctctccactccactccactct

SEQ ID NO: 1406 - DNA, 223 bp, Protomyxzoa rheumatica
cattccagtccattccattctattctattcggcttgattccattccattgccttccattccattcccttccattccattccattcggcttgattccattccattcccatccattccattccaatcctttccatttgtctccattttattcctttccattcctttgcattccacttgtgttgattccatcccattccattccattccattccactgcactctgg

SEQ ID NO: 1407 - DNA, 173 bp, Protomyxzoa rheumatica
caacctgagtggaatggaatgaaatggaatggaatggaaatcaacggaattgaacggaatcaaccagagttgaatgcaattgaatggaatggaatggattggaatcaaccaaaatggaatggaatggaatggtattgaatggaattaccccgagtgaaatggcatggaaagga

SEQ ID NO: 1408 - DNA, 154 bp, Protomyxzoa rheumatica
ggaatggaatggaatggaatggaatggaatggaacgaaatgtattggaatggaatggactggactcgaatggaatggaattcaatggaagggaatccaaaggaacggaatcaattggaatggaatggaatgcaatgcaatggaatggaatggaa

SEQ ID NO: 1409 - DNA, 228 bp, Protomyxzoa rheumatica
gaatggaatggaatggacccgaatggaatggatagggatgcaatggaatcaaatgtgtggaatgtattggaatgaattcgaatggaatggataggaatggaccagaatacaatggaaatgaatattgtcgagtggaaaggaatggaatatcatggactcgaatggaatggaatagattcgaatagaatggaaagaaatggaccagaatgggatgcaatggaatggaat

SEQ ID NO: 1410 - DNA, 154 bp, Protomyxzoa rheumatica
tccattccattctattcctttcgagcccagtccattccattcctttacaatcccttccattaaattctaatgtattccatttgagtccattccattccattgcattttaattgtatccattccatttcattcgtgtccattccattccattcct

SEQ ID NO: 1411 - DNA, 131 bp, Protomyxzoa rheumatica
catgctatgcatgagtttttgtttttaaaatcgtcgaaaaatatgattatgggtttttgttgattttgttgttcattttgataaatttacctatttaatataattattatgttttatgattagattcatct

SEQ ID NO: 1412 - DNA, 232 bp, Protomyxzoa rheumatica
aatggaatggaatggaatttaatggaatggactctaatggaatggaatgcaatggaatggactgaaatggaatggaatggaatggaatgcaacagaatgaaaatgaatctaacgaaataaaatggaatggaattcaatggacgccaatgaaagtgactcgagtggaatacattcgaatggagtggtatcgaatggaatggaatcaaatggaatggaatcgaatggaaaggaa

SEQ ID NO: 1413 - DNA, 181 bp, Protomyxzoa rheumatica
tggagttgaatggaatgtgatggagtggaatgtaatggaattgaatggaatggaatggattggaatggaacggagtggattggagtggactggaattgaatggaatagactggaatagaatggaattgagtggaatggagtggaggggagtggaagagaatggaacggattggaattgaaa

SEQ ID NO: 1414 - DNA, 201 bp, Protomyxzoa rheumatica
tccattccactcggtttgattccattccattccattccattccattacaatccattcctttccactcctgttgactgcattccatcccattccattccattccactcctttgcataacactcgggttgattcctttccattccattccattcctctccattgcataccactcggggtgattccattcctttccattccatt

SEQ ID NO: 1415 - DNA, 149 bp, Protomyxzoa rheumatica
caaagaaatgttaatctccgtaagttgcatgcaaacataccaaattagtttctgagaatgattctatctaggttttttatgaagatatatccttttctacaacaagcctcaaaccgcactaaatatccacttcgaaatcctacaaaaag

SEQ ID NO: 1416 - DNA, 143 bp, Protomyxzoa rheumatica
gaatggattcgaaaggaatggtctcgaatgaaatttattcgaatagaatgtaatcgaaagcaatgcaatagtatagaatggaatcaaatggaatggatcagaacggaacagactgcaatagaacggacttgaatgtaatggat

SEQ ID NO: 1417 - DNA, 143 bp, Protomyxzoa rheumatica
tcacaccaaatatcacactaaataaactattctcaaattttgtatcattaaattaaagaattctttttattatttaataattttttcatttattaattaattatccaagttatccaaaacttatatatttatcacattcacat

SEQ ID NO: 1418 - DNA, 138 bp, Protomyxzoa rheumatica
atccattccattcgtgtccattccattcttttccattgcattcgattccattcctctacattcaaatgagttctgtaccattgtttgcattccattttattccattccaatgcactccattccattccatttgattat

SEQ ID NO: 1419 - DNA, 157 bp, Protomyxzoa rheumatica
ttctgcgatcgccaccacagggatcacctcacgtagtactcccattttcacttcttcaatcacaaacaccgagagcacttcacgcagtactcccagcttcactttttcgaccaccagcaccgagaccacatcgcacagtactcccagcttcacttcc

SEQ ID NO: 1420 - DNA, 123 bp, Protomyxzoa rheumatica
gtcctatgcattttcataatgtgttagagaaacagcttttatgcagtgttttcaataatattgttttctctctgtgtctgtttctctgtctgtctctctctctcctgctttgctttctttgca

SEQ ID NO: 1421 - DNA, 128 bp, Protomyxzoa rheumatica
gatatgtcacaaagcccccatacatagaacctagacaagagtaccattacctgggagatcagtgcggatatatgtcacaacgtacccataggcagatccaacatgagagttacatcacctgggtgatc

SEQ ID NO: 1422 - DNA, 158 bp, Protomyxzoa rheumatica
taagtatcatactatatttgatcctaaacactgaacctaaactctaaaccctaaatcccaaaacctaaaatccaacccctaaaccctaacccctgaaccctaaatcctaaacccaaaaccgtaaaccctaaaccataaactcttaaccctaaaccctt

SEQ ID NO: 1423 - DNA, 160 bp, Protomyxzoa rheumatica
aaatggaatgtaatcaaatggaatggaaagtatgcaatggaatggaattgaacggaatgcaataaaatggaacagagtgcaatcgagtggaatggaatcgaaaggaacaggatcaaatgtaacagaatagaatggaatggaatggaatggaatggaatgg

SEQ ID NO: 1424 - DNA, 255 bp, Protomyxzoa rheumatica
cttgaagcaggactatgcgatcaagagcgagaacgcatcgcaactaatcatgttagccgataaggccgaggtagcggctttggccaaaacattcggtgcgaagaaatggcagaagggcaccggcaagccgtgcacggcgagcaccctctgcgtcgttgatggcgaggcccagactaggatagcgaagcacctgaagcttctctaacgccgcttgagcaaattggatagccagtgcttcagcttgggaccgtccaa

SEQ ID NO: 1425 - DNA, 346 bp, Protomyxzoa rheumatica
tagaatggaatataatggaatggactctaatggaaaggaatggatttgaatggaacgcaatgaaatgaaatcagaatgaaaggattggtattgaaaagaatggaatggaatggaatggaacggaatggaacagaatgaaatcaatggaatggaatggaatggactcgaggggaatagaatggaatcaatgggctcgagtagaatggaatgcaatggaatggactcgaatggaatagaatggaatggaatgggacgcactcaaatggaatggaatgcaatggactacaatggaatacaatggaatggactctaatggaatggaatggactcgaatggaatgcaatga

SEQ ID NO: 1426 - DNA, 258 bp, Protomyxzoa rheumatica
agagaccgagctgtccgtcggagtgattctacgagcatggcggatagatttgagcgaagtgagaacccggttgagcctagccaagcaccgtcatttgagcctagccgagcctcctcttatgagccaaagttccacgggaaggtttttaaaggcctctcgaagaaagtagaatctctcacgcacgcggtgaaggagatgggactccaaatcaaagatctccaaaggaagcacaagtctcctcccccttcaagtgaaaga

SEQ ID NO: 1427 - DNA, 129 bp, Protomyxzoa rheumatica
agccattgcccgcatgttctgttctccgactcgattgaggtcggattacaaaagcgcaccatcgggaaggagccgcgactagtgaatttatgagcgcggttctcgacagagggtactgagtcggggggc

SEQ ID NO: 1428 - DNA, 202 bp, Protomyxzoa rheumatica
agcaatttctgttccatggaagctgggctaccatggaatgaaagatgacccaggagtggcaaaggggagagacacatgtgaattcatcatacctccatttttcctattttaaagatatctaatggtacaaagaacaagagagatgagaaggtagtttgaacaggaggcaggattatctggggcggggtggggggcaggggtt

SEQ ID NO: 1429 - DNA, 133 bp, Protomyxzoa rheumatica
catcaaatggaattgaaaagaatcatcatcgaatggaatcaaaaggaatcatcaaatggaatcgaaggaaatcatcgtcaaatggaatcaaagggaatcatcgaatgaaatcgaagggaatcattgtcaagtg

SEQ ID NO: 1430 - DNA, 229 bp, Protomyxzoa rheumatica
ggactcaaatggtatggaatggaattgactggaatcgaaaggaattgaacaaaatagaatggactcaaaaggaatggaatggaattgaatggaaaggaatggaatggactcgaatggaagggaatggaatggactccaaaggaatgaaatagtcttgaagggaatggaatggaatgaaaacgactagagtggaatggaatggactctaatgggatggaatggaattgaa

SEQ ID NO: 1431 - DNA, 190 bp, Protomyxzoa rheumatica
cattccattgcattacattctattccattcaattgcattcttttcatttccctttgattacatttctttcaatcccaaggcattcgaatcaatttcatttcaatgcattacagtcgcgtccgttctgttccagtccattcaattccaaaccattgcattcgatacacttccattcgatcccattccatac

SEQ ID NO: 1432 - DNA, 132 bp, Protomyxzoa rheumatica
atggaccagaatggaatgcactggaatagaatggactcgattgtaatggattgcaatccaattgatttgagttgtatggaatcaaatggaatgaaatcatatggaatgcaatggtatgcaatggaatggaat

SEQ ID NO: 1433 - DNA, 172 bp, Protomyxzoa rheumatica
gaatcatcatctaatggaatcgaatggaatgattgaatggaatggaatggaatcatcatcaaatggaatccaatggaaacatggaatggaatctaatggaatcatcatcaactggaattgaatggaatcatcgaatggattcaaatgcaatcatcatcgaatgaaattgaat

SEQ ID NO: 1434 - DNA, 151 bp, Protomyxzoa rheumatica
tttcaattcctttccattctattccattcaggaccattccattccattccatttgcacccagtgcattccatatgagtacattccattccattccattcgtgtcatttccattccattcgagtccattcatttccattcgggtccattcca

SEQ ID NO: 1435 - DNA, 351 bp, Protomyxzoa rheumatica
atgaaatgcaaaggagtggattggaaaggagtggtgtggagtagaatgtaaaggaatttagtggaatggagtagagtagaatggaatggagtggagtgaagtggaatagagtggaatggaaaggaatggaatgaaatggggttgaatggagtggaatggaattgagtggactggactggagtgtaatggaaatgaaaggaaggaaggggaatggaatgaagaggaatttagtggaaaggaatgcagtggagtggaataaaatggagtgtactggaatggaatgaaatggagtttaattgaatggatttgagtggaattgactggagttgagttgactggaatggagtggaa

SEQ ID NO: 1436 - DNA, 137 bp, Protomyxzoa rheumatica
actccaatccactccattcgattccattctatttcttgccaatccattccattcaactctctccattccactccacaccaatgtgttccactccactgcattccattccactccactaaatttcactccactccatt

SEQ ID NO: 1437 - DNA, 276 bp, Protomyxzoa rheumatica
tccattcgtgtccattacattccattacattccattcgatatctttccattacaatccattccattatattcccttcaattccattgaattccattctattcgattccactacatttgattccattccattcgactccaatccattcgagtccattccataccattctatttcattccattccgtttgattcctatccattcaattccattttgttccagtccattccattcgtgtccattccattccattccattccaatcgatatctttccatt

SEQ ID NO: 1438 - DNA, 229 bp, Protomyxzoa rheumatica
catgaagatcacatcggcgtcgtacaagaagaaataatgtcgttagagtagaaacatcagaatatgagcaatagcttgacaggatcggatcaagaaagcaacacaacctatgtcgagaattataacacggtcaatgtgacggccaatgtatctgctaacgtggctgtcgctacagcaaccatcgcaactgtttcctttacagatttctcttgtaattcaatcacttgta

SEQ ID NO: 1439 - DNA, 129 bp, Protomyxzoa rheumatica
aatggaatcattgaatggctttgaatggaatcatcatcattggaatcgaatgaaatcattgaatggaattgaaaggaatggtcttcgaatgatatcgaatggaatcctagaatgtaatcaaatggaatc

SEQ ID NO: 1440 - DNA, 164 bp, Protomyxzoa rheumatica
gaaatgatgaaataatgaaatggcaatgatgagatgagaagaaatgatgagatgaaatgaaattaaatgatgagattaaatgatgagatgagatgtgatgaaatgagatgaaatgatgacatatgatgacatgcaatcagatgaaataatgagatgaaatgatg

SEQ ID NO: 1441 - DNA, 153 bp, Protomyxzoa rheumatica
cctttccattccattccattccactcaactccattctagtccattccattccactccactccaattcattccactccaatacattctgttccactccactcctttctaatgcattccgttccatttcactccattccattcgattccattcca

SEQ ID NO: 1442 - DNA, 175 bp, Protomyxzoa rheumatica
atatgttcaattttattaagagaaagaatatgatgtagaatgttaaaagtaaaaagatggtgttgaatacttgaatttatgaaccactgtaaaccattgtacatagtgtaagagatagagcactccttactccagttcactgactagtataaaaaaagttttcttctgttttatt

SEQ ID NO: 1443 - DNA, 143 bp, Protomyxzoa rheumatica
cctctccactccactccacttcaaagcattccatttgatttcttaggatacctttcgattccattccattcaatccattccatttgattccattccatttgattactttccaatggattccattcaatttctttccattccat

SEQ ID NO: 1444 - DNA, 334 bp, Protomyxzoa rheumatica
ttccattccattcctttccattccatttcattccattccactccactccacttccttccactcgtctccattgcactacactcgattccattccattcagttccactccattgtattccactccactaatttccaccccattccactccattccgttacgctcctctcctctgcacgccactccactccattacactccgctccacatgactccactctgctaaaatccactccattccattccacttcactctactgtactccgctacagtacattcccttccactccacaccactacactacattccactcaaaaccattagactcatctcc

SEQ ID NO: 1445 - DNA, 158 bp, Protomyxzoa rheumatica
aatggaatgcattggaatggaaagtaatggaacaggctggaatggaatggaacagactggaatggagtggattggacttgattggaatagaatggaatggattggaatggactcgaatgtaacggagtggaatggattccagtgtaatggaatgaaca

SEQ ID NO: 1446 - DNA, 162 bp, Protomyxzoa rheumatica
attccattccattccattccattccattccagtccattcctttccattacattcctttgcattccattcaattccaattgggttgaatccattctgttccaatccactcctttccattccattcctgtttattccataccattcaattccattccgttccat

SEQ ID NO: 1447 - DNA, 138 bp, Protomyxzoa rheumatica
caagcaatacggggaacaaaggagaaagcaggagcttcatgagagaaagggataatgacgtccatgtgagcacattgcattcaaggatcctcgagacaccaggtggaaacgtctgagttctgcaagtgagccttgtag

SEQ ID NO: 1448 - DNA, 149 bp, Protomyxzoa rheumatica
ttccattctatgccactccatgccattccattccactacactaatttcctctccattccactccacttcactctactccactccactacatttcattccttgccattacattccattccaatccattctgctccactccattgcattcc

SEQ ID NO: 1449 - DNA, 122 bp, Protomyxzoa rheumatica
cccgaggtgaatgagcgccatcgtcaccgttatgaggtgaacaataactatgtgcctcaacttgaagaggccggcctgcgtatttctgcccgtacgccgactgaaaatttgccggaaatcat

SEQ ID NO: 1450 - DNA, 125 bp, Protomyxzoa rheumatica
caaaaggattcagccctgtcatagtatgagttagtgcttcattcctttttagagttgagtaatatttcattagatgggtaaactatggagtcctagctggagaaaaggaatcaggctggtgggac

SEQ ID NO: 1451 - DNA, 134 bp, Protomyxzoa rheumatica
cccagaggaccccttcagagagagcatcctatttaacaccaggtttcctgctatctttatcaaagcacctattgatttatttcatcaatagctataatttctatttatttgattatttacctatgtatcacttg

SEQ ID NO: 1452 - DNA, 286 bp, Protomyxzoa rheumatica
aagcgctggacgttcccgagcacccttttcggccaagcgagatcgtcatcgtccgcgatgactatcattccctcgccgactccttttacggcttcaattccccgctcaacaaaaacatttacactctccccctcatttgaggccccccatggaggattagtgtagaagcaatcatacttcatcgcctccgagggaaatgcatcgagacaattgtagagcttggcgtccaagtactcaattcgctctcggtcggcaaatcgagtaaccgactgaacggttcgttcgt

SEQ ID NO: 1453 - DNA, 175 bp, Protomyxzoa rheumatica
attccatttcattgcattccactcaactccgctccactccactacacaccgttcagttccattccttcccactccattccattccacaacattccactccagtccactacattccattcaaatccgttccacctcattccattccactccaatgtactacacttcaacgcattcc

SEQ ID NO: 1454 - DNA, 185 bp, Protomyxzoa rheumatica
atggaatagaatagaatggaacagaatggattggaatagaatggaattgtatggagtagactcaagtggaatggaatggaatggacttgaatggaagagaatggaatttactggattggagtctaacggaattgactctactgaaatggaatgaaatggactcgaatggaatggaatggaatgga

SEQ ID NO: 1455 - DNA, 172 bp, Protomyxzoa rheumatica
cattcgattccattacattcgattcatttccactcaattgcattccgttccattccattgtcctccattctattccatgcaattgcactccattgcattccatttgattacattcctttcaattccattccattcaaatcatttagattgcaatccattacattccaatccg

SEQ ID NO: 1456 - DNA, 239 bp, Protomyxzoa rheumatica
agtggagtttattgagctggagtcgagtggaacagaatggaatggaatgaatggaatgaaatggaatggaagagacggaagttaaaaggaatggagtggaatggaatggagggcagtggcatggaatggaatggactggagtggaatggaatgaaaaggaatggaatggaatggaggggagaggaatcgagaggaatgcaatggagtatagtcttgtggagtggagtggagtagagtgg

SEQ ID NO: 1457 - DNA, 316 bp, Protomyxzoa rheumatica
ccatttgattccattcaattccattccatttgtgttctttccattcctttccattcgagttatttccattttaatcgagtccattccattccattcctttcgagtcttttccattccattaccattaattccattccattccgttacattcgattccattccattcgattcaattccattccattccactccttttgattccattccgttccattcctttgcattccattcctttccgttccattccattcaattttattccattcctttctatttcattacattccattctgttcaattccactccattccattc

SEQ ID NO: 1458 - DNA, 203 bp, Protomyxzoa rheumatica
catactgccaaccaacaacacagcaccattgagatcttcaagcttgaggttcatcgattgcctctaaagcaataggcgggcgaaatagacttcgttcgaggaatgtgtgtagttattgactacgccgcattattctcacagtttatgaatggacacattctgacagcccttctatgcgacgttaaagggggcaccaaccatta

SEQ ID NO: 1459 - DNA, 150 bp, Protomyxzoa rheumatica
acaaaggtatgggatggaatagagtggagtggagtagagtggagtggaatacaattcaatggaaagtagtggagtggagtggaatggaatggactggagtggagtggaaaggaatggactggagtggaatggaatggaatggaatggagt

SEQ ID NO: 1460 - DNA, 199 bp, Protomyxzoa rheumatica
agtggaatggaatggagtggtgtggaatggagagcaattgactggaacggacagagatgaattaaatggaatggaatgagatggcaaggaatggaatggaatcgtttgttgtggagttaataagtgtggagaggagtggagtagtgtgaagtggaatggagtgtagtggaatggagaggactggaatggaatttagggg

SEQ ID NO: 1461 - DNA, 211 bp, Protomyxzoa rheumatica
ctcgaatggaatggactgaaataaaatgtaatcgaacggattggagtcaaagtgaacagattggaaatgaatggaatggaagggaaaggacttgaatggaatggaaccaaatggaatctaatggaatgtaatcaaatggaaaggaatagaatacaacggaatggaatagaatggaattcaatagaatggaatagaatggacagcagtggaa

SEQ ID NO: 1462 - DNA, 197 bp, Protomyxzoa rheumatica
cattccatttgattcctttccattctattccattccatactgttgcattcctttcgattccattctattcgaaaaaattccattgtagaccattcatttccaattgattctatttgagtcccttccattcaagtccattacatttggttccattccgttccattcccttccattccattccatttgatatcaatcca

SEQ ID NO: 1463 - DNA, 125 bp, Protomyxzoa rheumatica
caaaactgaaccaaaatttaatattctttataaatttttccttttttgtattttctttccgtatttttttggttaatttcttttagtttcggttaattttggttattttgataaaacctaaccaa

SEQ ID NO: 1464 - DNA, 135 bp, Protomyxzoa rheumatica
tcggcctcaaagcgctgtaaatatacactagcaaaccccacaaaaagagtgaatctaaactgctctataaaaagaacggttagactctgtaacccgaatgcacacttcacaaagtagtttcagagaatgattctg

SEQ ID NO: 1465 - DNA, 277 bp, Protomyxzoa rheumatica
tccattccataccactccgttctactttactccactccactacactaaattccattgtatccaactccattccatgccattgcactcctctcctctgcactgcactccacagcactccattccactccatccccttccattctgctccattcaacgacaatcttctccacacaactcatctccacttcattccattccattgcattccgttccatctcattccatttgtctccattccagtcaactctaattcaccccactcctctccacttcggtc

SEQ ID NO: 1466 - DNA, 302 bp, Protomyxzoa rheumatica
ccgttccattcctttccattccattcaagtccattttattcatttccattccaatccattaaattccattgtattcttttccattcatttcgggtccattcaattcatctgcattccacttgagtcctttccattacattccatgccattgcattccattccattcgagtccattcaattccattcgagtccatttcattccattatatttcattctgttagagttcattccatttcattccattccattatattccagtccattcaattccattccattccattcgagtcccttcaactcc

SEQ ID NO: 1467 - DNA, 270 bp, Protomyxzoa rheumatica
gaggggattggactggagggctgtggattggaatggagtggaatcgaatggaatggaatggagtggagtggaatgaggtagagtggaatgaaatggaagggaatggagtggagtggagtggggtggaatggaattgagtgtaatggtggggagaggattggacaggagtagagtgcagtggaatggagagtagcggagtggagtggaatggaattaaatggaatggaatggagtcgaatggaatgtagtggaatggagaggagtgcaatt

SEQ ID NO: 1468 - DNA, 145 bp, Protomyxzoa rheumatica
cggccacgtccagttgggttatctcaaaatcatagtatctgatctcagaggagccattgagagctttggcaaggcgctgaaactcgatcctcagtcctcgatagctctcctcgacgtcggctatatggagtttctcgccggtcat

SEQ ID NO: 1469 - DNA, 142 bp, Protomyxzoa rheumatica
cactacattccactccacttcattgcaatccactcaactccatttcaccacattctatttcattccattacagtccattccgttacactccattctattccacttcactctaatccacttcaatccattccattccacttca

SEQ ID NO: 1470 - DNA, 178 bp, Protomyxzoa rheumatica
ggactctaatggaatggaatggagcagattcgaattaaatggaatggaatcgactggaatgcaatggactagaatagaaaggaatggaatggacttgaatggaatgaaatggaatgaaattgacacaaatggaatgggatggaatggaatggactcgaatggaatggcatggaatgga

SEQ ID NO: 1471 - DNA, 133 bp, Protomyxzoa rheumatica
acacacacacacacacacacacacacatacacacacctctggtgatttcaacactgccaaaaataagagaagatctgatggagggaaaaaaaaacacagagtggaaagtaacagtgcatctcctactcaattt

SEQ ID NO: 1472 - DNA, 170 bp, Protomyxzoa rheumatica
tttttataaaaattatttttataatttaaaaattttttccgacgagcgttcatgcgagagttataggtccgcgagtaacgtcgattgcggcgaaagtttgtagatgtgacgaacttttaaaaagctgtgggggcaatgactactgaggcgctgtcgtgtagtctggggtt

SEQ ID NO: 1473 - DNA, 126 bp, Protomyxzoa rheumatica
agctgtgccctcgcagggccagcggggcacctgcacgcttgccttcctcttctgatctgcctcctgaccacccaggccccctaaaagcagagtaactggccctttaggatcactctggaaagttaa

SEQ ID NO: 1474 - DNA, 152 bp, Protomyxzoa rheumatica
tcacacacacatgcacactcacttccacggtcacacacacgcatgatcatatgcatccacacatccacatatgatgtcctcatgcacagtggcaaggagtctttctcccagagctacccttgttgggggcctgcaccaacaccactgttaca

SEQ ID NO: 1475 - DNA, 128 bp, Protomyxzoa rheumatica
ggaatggagtgcaaaagagtggaattgagtgcagtggagtagagagaagtgcaatataatggaatggaatcagacataatggaatgtagtgcactggagtggattgaaatggaacggaatggaattta

SEQ ID NO: 1476 - DNA, 207 bp, Protomyxzoa rheumatica
tggaacggaatggaatggattctaatggaatggaatggaatggaatacaaaggaatggagtggaatggaatggaatggattggagtggattggaatagaatgtaaaggattagagtggaatgaaattgaatgtaaaagagacgagtgaaatggaatggaatggattggaatgtattggaatggagtggagaggaatggaatggactg

SEQ ID NO: 1477 - DNA, 181 bp, Protomyxzoa rheumatica
gggttctccatgttcgagatgaaaccaagacaaaagattgccactgtcaaaagtagaggtgggatcctggtggctagctcggtttcgatcttttctcgcctttcttttctttcttttttcttccttcgctgggccatcctggcattgcttaaattcatctttcaccggatcgaatcaaaga

SEQ ID NO: 1478 - DNA, 131 bp, Protomyxzoa rheumatica
ggaatggaatggaatcgaatggaatcgaatggaatggaatttaaaggacacgaatggaatggaatgtactcgaatggaatggaatggaatggaaacgactcgagtggaatgaaatggaatggaatggaatc

SEQ ID NO: 1479 - DNA, 266 bp, Protomyxzoa rheumatica
agtcgaatggcatcgactggaatgtgatgaagtggagaagagaggagtggaatggagcggaatgaaattgggtggaatggaatttaagggagtggagtggattgcagtggaattgtatggaatggaaagagaaggaatgtaattgatcagagtggagtttagtggagtggagtacaaatacaatgtaatgaaatggaatggaatggaaacgaatgtattgtaacataattgaatggaatggaatcgaatgcaatggaatggaatgg

SEQ ID NO: 1480 - DNA, 162 bp, Protomyxzoa rheumatica
atgctgctagttgttgaaaaagctgagatggatcagagaaatctagcagggcagaagcatgtttgtaagcaactagaacacagggaagacacggatcactttttagagtgcaggtagactctaccacagaaagggaagggcaaagtaccatggacaccgttg

SEQ ID NO: 1481 - DNA, 162 bp, Protomyxzoa rheumatica
tccactccactccaatcctctccaatttactccactccattccattccattccactccactccattccatgccactccattccaataagtccatttaattccactcccctccattcaattccactccactacactccactgccatcctttccactacactcc

SEQ ID NO: 1482 - DNA, 299 bp, Protomyxzoa rheumatica
tcattccgttcggttcgattgtattccattctattccattgtgttccagtccattccattttattccatcccattccggtcccttcgattcaattccattctatttgattccattcctttccattgcattcctttcgattccattcaattcaattccattcccttcgagtccattacattcgagtccaatcaattcaaatccattctattccattccattccattcgatatcactccattctattccattccattccatttcgtgtgattccattccattcgggtcccttccatttgag

SEQ ID NO: 1483 - DNA, 286 bp, Protomyxzoa rheumatica
attgcggaccagaaatattctgtggactggattgatgaggaaaccagtcgcaggttgtttgagcaagggtgtgggcaaacagcagcttgttactacgagctgacgctggatggtgtaacagtcaatggcaaatttgcctacgtgaccgatttgctcaaaggggaatacaccttcgagattgacgcgaatgaaaattttgaactattgaatgcaaccacaaccgatttggcatcttgattgctttgtcgctgacaaaaacgccgacctgaaggtcggcgtttttgtt

SEQ ID NO: 1484 - DNA, 172 bp, Protomyxzoa rheumatica
actgcactccaatccactcctctcaactccactccgctccattcgattccattccgttccggtcagttccattctgttccactccactccatttcattccactccactccactccacttcactccattagactccactccattccgttccattccattccattccattcctt

SEQ ID NO: 1485 - DNA, 142 bp, Protomyxzoa rheumatica
tctctcctctgaaagggacataattatagtacttaactcttagactggtgaagattggcttactaagcatatggaaagtgcttagagcaggtcctggaataaatgtttcataaatgttagttattgctaccttttgtaatat

SEQ ID NO: 1486 - DNA, 151 bp, Protomyxzoa rheumatica
ttccagtccattccatttggtttcattccgtttgattaaattccgtttgattcaacttcattcgattccatttcactcgatttcattccattccagtccattccattcgagtccattccagtccattccattcgagtccattccattccat

SEQ ID NO: 1487 - DNA, 101 bp, Protomyxzoa rheumatica
tgatcattccatgacgagccacgtgagcagtgcatgatagaaacgtgatgtgtgcatgatgagttacgtgagcagagtatgatcagccacgtgatcagtgc

SEQ ID NO: 1488 - DNA, 158 bp, Protomyxzoa rheumatica
aagctgggtatggtgtcatgtgccagtagttccagccaggggactacatatatacattcagggttgagaattactgccaagacactgcactagaatgatttcactttccagtagaggttgattatgctttcaactactcagtgtatatggataattag

SEQ ID NO: 1489 - DNA, 160 bp, Protomyxzoa rheumatica
gcattaaaaccctttccatttcacttcactccaatccattccattctactcgattccattccatttccttccattgcattctaccgcagtcctctcttgccaattccattccattcctttccactcctttcctttccattccactacactccattccatt

SEQ ID NO: 1490 - DNA, 198 bp, Protomyxzoa rheumatica
gagcgcggggccgggaattgcaaatcgcacacgcaccttaagcggagcaaaggtcgcgaagaaaaacccgaccacaagtgacgtatggacgcggatcaacggcttctacggcatgacaatcggatactccgatccgcagccgacttgatggagatttgatacaatggctgaacctcacgtctcgccacttgtgccggt

SEQ ID NO: 1491 - DNA, 228 bp, Protomyxzoa rheumatica
ctcaactacatattatattctgtacataaaataacaaagtacccaaactatatattgcatattgtatataaaatctcaaagtaccctaaatatatattatatactgtacataaaatatagaagaactcaaattatgtattatatactgtacataaaatagtaaattacccaaaatatatattctatactgtacataaaataccaaaatacacaaaatatatattctgt

SEQ ID NO: 1492 - DNA, 223 bp, Protomyxzoa rheumatica
ccattccattgcattccactccattccattcccttccacttcactctactccattccattacactccaccccactacattccattccactccattccatttcattccattccactacactccactccaatccatttcattctcttctattcctttccattccattcctttccaatctgcatccctccactccattgcattccaccccaacccactacactgca

SEQ ID NO: 1493 - DNA, 141 bp, Protomyxzoa rheumatica
aatggaaaaatggaatcaaacggaatcgaatggaattgaattgaatgtaaaaaatggaatcaaatggaatgcaatcgaatggttttgaatggcatcaaatgaaatcgaatggaaagtagtgaattggagtggagtggaatg

SEQ ID NO: 1494 - DNA, 168 bp, Protomyxzoa rheumatica
tacactccattccattgcactccactctattccattccactccgtttcattcagttctattgaactccattgcattccctcccattccactccacttcactcctttccgatccgttccactccacaccactccactacattgctttccaatccattccactccatcgc

SEQ ID NO: 1495 - DNA, 135 bp, Protomyxzoa rheumatica
actcaaagaaatggaatggaatggaatggactcaaaagaaatggaatgtaaaggactcgaatggaaaggaatggactcaaatgtaatgttttggaatggaatataatcgaatggaatggaatgcaatggactcaa

SEQ ID NO: 1496 - DNA, 127 bp, Protomyxzoa rheumatica
accacgggaatgcccatggtacttgcccggtttcgtaggcgttcgagcaattcgaggccgtcgattcccggcatcgagacgtcactcaggatcaggtccggaagccattccgccgcggttcgcaccc

SEQ ID NO: 1497 - DNA, 307 bp, Protomyxzoa rheumatica
ttcaattcccattcactctacccaatccactctactccatcccattcaattccaaaccactcaaatcatctccattccactccattccatgccactccactaaactccattccactcctttccgttctactccatttaataccattccactcccgttcactccgttacattccattccactccactccgttccattccattccgttccattgcattccattccatggaattccattccagtccaatccactccgttccattccatttcactccactccgttccattccattccgttccattgcattc

SEQ ID NO: 1498 - DNA, 144 bp, Protomyxzoa rheumatica
tttcataaagaagcatattatataattgtaattagatggtgaacacagcgcttggtgcagatttagtactcaataatgtcagatgttattttttacctctgttattgccaccttcatcagcaacataaccatagttgtcgccat

SEQ ID NO: 1499 - DNA, 178 bp, Protomyxzoa rheumatica
atttctaataagcccttacatgatgctgacgttggtccaaggacaatattttgaacaataagagttttggaggctttccattccagaaaaacaaggttttgtgggtagcagaatggaaagaccctagaagaccaagattaaatacagagaatatggcatagtaaaagaaaaattcaaa

SEQ ID NO: 1500 - DNA, 147 bp, Protomyxzoa rheumatica
acaaaacagatagaaattccttccccactggagcttgcattctaggtgggaaacgaataagaaaattgtgttgtaacttagataatgatattcttatggcaaattatgctgctgggagaggagtcagggtgaggttgcagtgtgaag

SEQ ID NO: 1501 - DNA, 153 bp, Protomyxzoa rheumatica
attggagtggattggagtggagtggaatggagtagagaggactgtaatggagtggaattgagtggagaggagtgtaatggagaggaatggagcggaatagagtggaaaggaatggagtggaatggattggaatggagtggaatcaaatggaat

SEQ ID NO: 1502 - DNA, 143 bp, Protomyxzoa rheumatica
aacatccttctttctggtgatggagctgttgttaccacagacatgaatatcagcagtctctgatgttcaactcacaatgttcacgtcccttactttttcaacatggagctccatgaatttttcccacttcacttttttctttt

SEQ ID NO: 1503 - DNA, 157 bp, Protomyxzoa rheumatica
gagtgtttcaaacctgctttacgaaaggaaatgttcaaccctgtgacctgaattcagatatcaaaaatcagttcctgagagtgccactgtctagattttatatgaaagtattcccgtttccaaaaaaatcgtgagagctatccaaatatccacttgc

SEQ ID NO: 1504 - DNA, 151 bp, Protomyxzoa rheumatica
cagaacacacacaatacacaacacacaccacacacaccacacaaacacaaacatcacacacaccacacacacaacacacacaatgcacaatacacaccacacacacaccccacaaacaccacacacaacacacacaaaacacacaccacac

SEQ ID NO: 1505 - DNA, 216 bp, Protomyxzoa rheumatica
ttccattccttttcattcctttccattccatttctttcaattgcattccaccatattccattcaacttctctacattccttttcaatccacttcactccaatacattccactcctttccattccacttcactcccctccaatcctttccattccattctgtttctctctactccactgcattccactccactccattccattccattccattccat

SEQ ID NO: 1506 - DNA, 183 bp, Protomyxzoa rheumatica
tggaatggaatggaatggaatgcaatggaatggaattgaaaggaatggaacagaacggaatgaaatggaatgggatggaatggaatagattggaatggtatggaatgtaatggaatgaaatcatcccaagtgaaaaggaatggaatggaagagaatggaattgaatggaatggaatgaaatgg

SEQ ID NO: 1507 - DNA, 276 bp, Protomyxzoa rheumatica
cattccactcaattccattgctctccattccatttcactccacgccattcttctccattccactccaatccattccattaatattctttccacaggaatccattccattccactccattccactccattgaattagactccactccaatccattccactccattccattccactccaatgcgttccactgcattccattccaaaccattccaggcaaatccattcctttcctttccattccaatcctttcctttccattcaattcgactccactcc

SEQ ID NO: 1508 - DNA, 158 bp, Protomyxzoa rheumatica
ttacatttcattcgtgtccattccattccatacgagtccattccactacatttgatttcatttgagtccatttcattccatttcattagtgtcaaattccattaaattccaatccagtatatcccactctattcaattcgaatccattgcattccatt

SEQ ID NO: 1509 - DNA, 312 bp, Protomyxzoa rheumatica
ggaattgagaggagtcaaatggagtggagtggattggaatgaattggagtggaatagattggagtagagaggaatggaactgagtgatttggaatggaatggagaggagtggactagagtggagtggagtggagtggaatgtagtgaaatgaaatgaatggaggggaatgcagtagaattgactggagtggtgtggaatggaaaggagtaggagtggaatggaatgaagtagagtgcggtagactggagtggaatggaatggagtggagtgcaatggaatggaatggaatggaatggaatggaattgaatgg

SEQ ID NO: 1510 - DNA, 156 bp, Protomyxzoa rheumatica
tggaatggaatggaatcaaaccgagttgaatggaaaggaagggaatgaaatgaaatggaatggaatgcaatagaagcaacccgattggaatgaaaggaagggattttaatggaatggaatggaagggaacggaatggaaaggaatggaatggaatg

SEQ ID NO: 1511 - DNA, 328 bp, Protomyxzoa rheumatica
tggagtggaatggaatggaatgggaaggaatggaattgagcagagtgaataggagtgtagtggaatgcagtggaatggaatggaaggaatagaagggaatggaatggaagggaatggactcgaatggaatggaatagaatgcaatagaattgaatggaattgattggaaacgaatggaaacgaaacgaatggaatggaattgaatggaatggaaacaaatagagtggaaaggaatggaatggaatggtctccaatatagtgaaatggaatggaattgagtgcaatggaatcaaaaggaatggaatggaatcaaatgaaatggaatgga

SEQ ID NO: 1512 - DNA, 139 bp, Protomyxzoa rheumatica
cattccactgcactccacttcattccactcaattctattccactcgattccattccaatctgttccatgccattccattacactacattccattccactctattccattccgatccattctggtctattaccttccact

SEQ ID NO: 1513 - DNA, 150 bp, Protomyxzoa rheumatica
gtattcgagtggaatggaaaggaatggaatcacccctagtggaatggaagggaatggaatggaatggaaaagaatagaatggaaacaactcaagtgtaatggaatgggaaggaatggaatggaatggaatgcaatggaatggaaacgaat

SEQ ID NO: 1514 - DNA, 166 bp, Protomyxzoa rheumatica
ggaatggaatgtaatggaatggggaagattaaggtggggtggactggattggaatggagtgagatggaatgcaatggaatggagaggaagggagtggagtggaatggcatggagaggaagtattggagtggagtggagtggagtggaatgaaatgtagtggaatgg

SEQ ID NO: 1515 - DNA, 164 bp, Protomyxzoa rheumatica
tggaatggattcaaatggaaaagactggaatgaaatggacttgaaaggattggactggaaagtaatggacacgaatgaaatgcaatcaaatgcaaagcaattgaatggaatgtaatcgaatggaaaggaatcgagtgcaatggattcgaatggaatggaatgga

SEQ ID NO: 1516 - DNA, 163 bp, Protomyxzoa rheumatica
cttgaaaacttcggcaagatcaatccgctccgaaaatacactgcttccgcccatacgggttctctcaaacacccctgaccgcgactctatcgcgatacaattcgacaaaactccggacagcgcgcttccgcatgatctgaccgtctggatgaggatagagata

SEQ ID NO: 1517 - DNA, 184 bp, Protomyxzoa rheumatica
gtcaatcaagtcgtagatgcattcttctagcgctgagaacatggtcggaacgtcaaagctgccctggaatatcatcttccagcagtaatctttactgccgccttgaggcgcccccacctgtgcgcaggcaaaaattgcaatcattcgcgctgcttgatctagtatctctatcctcatccagacg

SEQ ID NO: 1518 - DNA, 196 bp, Protomyxzoa rheumatica
agtggagtggagtggaatggagtggagtggagcggagtggagagtattggaatgaaatgcagtggagtgaaatggagtggagtggagtggaatagaatggaatggaatggagtgaactgaaatggaatgttgtggagtgtagtggagtgcagtgtcatggagtggagtggcgtggagaagagtcgaatggaatgga

SEQ ID NO: 1519 - DNA, 206 bp, Protomyxzoa rheumatica
tcagagtccatcagcaggattgatcccttacccatcacccctctaaattccctccacctccctttcctccagttgttaaactctgttcccagaatttctctccaaacaaacatgcctcatctgcttgctttcacccctaattcctgttcttctcctatctcaggactgagctcttctttccccattgctgtgagaatgtagattgc

SEQ ID NO: 1520 - DNA, 135 bp, Protomyxzoa rheumatica
agtggaatggaatcgaatggaatgggatggagtggagtggggtggagtgaaatagaatggattggaatgggacggaatggaatgcaatggaatggtgtaaataaatggaagctaagattgtgccaatgcactaca

SEQ ID NO: 1521 - DNA, 156 bp, Protomyxzoa rheumatica
ataactgtgagatgagactgaaagaggaaaattgtggttaaaggatcaactggaagaaacctgctgtaagagattatatttatgaacaatttcttaaagacaacattattagaaactaagtttgtaataaattctgtatgaaacaaatgtaaataa

SEQ ID NO: 1522 - DNA, 164 bp, Protomyxzoa rheumatica
tggagaggagtggaatggaatggagtggaattaaatggaatcacatggaaacccatggaattgcatggaaacgaatcaaatcaaatccagtggaatcaaatgtaatcaaatgcaatcaaatggaatggaatggaaaaaagggaatcaaatggaatcaaatggaa

SEQ ID NO: 1523 - DNA, 211 bp, Protomyxzoa rheumatica
tcacatcattccatttaactccattcaaatccactcgtctccacttcaccacattccaattgattcctttcgatgccattcgattccattcgatgcgatttcatttgataccacactattccatttttcccattcgaatccattcgattccttttgattccattcgattccattccgttccattagatatatttcattccattcgattcca

SEQ ID NO: 1524 - DNA, 192 bp, Protomyxzoa rheumatica
ggcacaatctcagctgacatttcatttcaccattccattcaattccgttccattcagttccattctgctctactccactccactccattgcaatccattccacttcactgcactccattccattccactccactcctttcccttccatcccattccattgcactcctttcctctccaatccactctactcca

SEQ ID NO: 1525 - DNA, 130 bp, Protomyxzoa rheumatica
aaggaatggaatggaatggaatagaatggaattgaatcaaactgagtggaatggcataatggaatggaatgcataggaatgaaacggaatttaatggaatggaatagaatggaatggaatacaatggaat

SEQ ID NO: 1526 - DNA, 251 bp, Protomyxzoa rheumatica
agtggagtggaatggagtcgaatatgttcgaatgccgttggatggagtggagagaaattaaatggagtggagtggaatggaatggagtgcactggaatgaaatggaacggagtggaatggataggagtggagtggagtggagtgaaatggactgtagtggaatagaaaggattggagttgagtggaatggattggagttgaatggagtagactggagcagaatggaaaggaattgaagggaatggaatgga

SEQ ID NO: 1527 - DNA, 190 bp, Protomyxzoa rheumatica
gagtccattccattccataacaatccgtttgattccatttagttccagtacattgcattcgagtccattccattccattccattcgaagccattgcattcgattttattgcattgaactccattccattccattcctttccatccgattccattccgttctattcctttccattccattccattccattc

SEQ ID NO: 1528 - DNA, 149 bp, Protomyxzoa rheumatica
aatggactagaatggaatagaatggaatgaactctactggaatagaatggaatggaacggactcgaatggaatgcaatgaaatggacttgaaaggaaacgaatggtattgaatggaatggaatggaattgaatggaatggaatgaaatg

SEQ ID NO: 1529 - DNA, 208 bp, Protomyxzoa rheumatica
ggagtggaatggaatggaatggattggagtggggtcgaatggattggagtggagtggaatgggatggggttgactggaatgcaacgcagtgcagtggcatggaatggaatggaatggaatggagtggagtggaatgaatttcagtggaatggagtggagtggggtgacatggaatggagtggaatggaatggaatggagtggaatgga

SEQ ID NO: 1530 - DNA, 277 bp, Protomyxzoa rheumatica
gaatggaatggaatggaatggaatcgtgaaatgaaatgatagctgagattatggcacttcactccatcccccaggatgaatcccatggattccattccattcctttgacagaaaggaatggaatggaatggagtggaatgtaatggaggataatgcagtggagtggaatggagtggaatggagcggaatggaaagagatgggatggagtggaatgggatggactggaatagaatgggatggagtggaatggagtggagtggagtggagtggagtgga

SEQ ID NO: 1531 - DNA, 123 bp, Protomyxzoa rheumatica
gaattgaaagcagtgaaatggaatggaatggaatgtaacagaaacgagtggaatggagtggaattgaaaggaatggatttgaatggaacagaatggaatggaatcaacccgattggaatggaa

SEQ ID NO: 1532 - DNA, 164 bp, Protomyxzoa rheumatica
gaattgaatggaatttagtggaatcgagtggaaagaattggaatggaatggagtgcagtgtaaaggaatggaatggagtggagtggattggagcggagtgtagtgaattggggtggactgtagtggaatggagtttagaggagtggaatggagtggatttgaat

SEQ ID NO: 1533 - DNA, 155 bp, Protomyxzoa rheumatica
tggaatcgaatcgaatcgaatggagtggaatcaacacaagtggaatgcaatggaatggaaaagaatggaatggaatggaatgaatggaatgggatgaaaataacccgagtggaatggaatggaatggaatgatagtgaatggaatggaatggaat

SEQ ID NO: 1534 - DNA, 126 bp, Protomyxzoa rheumatica
cacactgcacacacacatatcacaagcacaccataccacacatagtacacatacacaccacacacatacaccacaaacacagcacatacacacaccatacaccacccacagtattcacacgacacc

SEQ ID NO: 1535 - DNA, 208 bp, Protomyxzoa rheumatica
ctccactccaccccaccccactcctctccactccattccattccactccaatccatttcattccattccattccaatgattccattccactgcactctgatcctctcaactcaactccactccaatctactccgttcccttcagttcgattccattctgttccaatccattccattctgttccattccattccattctactccactcc

SEQ ID NO: 1536 - DNA, 149 bp, Protomyxzoa rheumatica
aatggaatggaatggaatgtactcgaatggaatggaatggcctcgaatgtaatgtaatgaggaagaatggaccagaaaggaatgtaatgcaatggaatggactgaaatacaatggaatggaatgaaaaggacatgaatggaatagaatg

SEQ ID NO: 1537 - DNA, 177 bp, Protomyxzoa rheumatica
ccagtccattccattcgactctattctatttgagtccattccattccattcctttccgttccgtttgattccaatccgttacattccattttgttccagtccattccattcaactccattccattctggtccattcgattcgattccatttcattcaattccattccatactattac

SEQ ID NO: 1538 - DNA, 175 bp, Protomyxzoa rheumatica
cttacataattttgatgaatataggatttgtgggttagttaattattttccactttctatttataaatttcagttgtttcttcaacttccggtcagtttcgtaggcctataaactcttgactttcagctcctccctctttattttggatggtcctactctaattattgatatgca

SEQ ID NO: 1539 - DNA, 177 bp, Protomyxzoa rheumatica
ttctgtgcaaagaaaataaaggtaaaataaaaaataaaaacgagctatgagggcttgctaattttttgcttatattttacttatattttgttttcttgacttaaatgtattattgcctaggaaactacataaacttctgagtgtctcagtttctctataaaaataaaaaaaaacacc

SEQ ID NO: 1540 - DNA, 222 bp, Protomyxzoa rheumatica
ttcttctttgcaaaaaccgtttcaatttcggaaatactagttacgaggtcctcgtttacgatgaagaatgctgagtcgatcccaggatctttgccctcgtagactaatagctcaggattaatgttctcaaacgtaaactgcttagcgatggcataagctgaaaatgcttcgaatgcttttggttcgtcgaatgatatcgaaaattcggaacaaaaggcgttt

SEQ ID NO: 1541 - DNA, 145 bp, Protomyxzoa rheumatica
tcgaatggaatgtaaaggaatggacccgaatataatggaatgcaaacgaatgaactcgaatggaatggaatgcaattgtctcgaatggaattggatggaatgcaatggacttgaattgaaggcaatagaatggaatcgaatggaa

SEQ ID NO: 1542 - DNA, 122 bp, Protomyxzoa rheumatica
cactccaatccactccattccatttaattccactcctctccactcaactacattccactcgattccatcccactccactgaaatctattccactccagtccatccactccattccacttgat

SEQ ID NO: 1543 - DNA, 135 bp, Protomyxzoa rheumatica
tgtggtgttattctgtgtgtgtgcgcatgtgtgggtggtgttattccgtgtgtggtgtgtgtatgtctgtgtgtgcatgtttctggtgttattctgtgtgtgtggtgtgtgtatgtctatgtgtgcacgtgtgtc

SEQ ID NO: 1544 - DNA, 339 bp, Protomyxzoa rheumatica
cgttaatgcaggttgcctttcgccgtgcccaaggactaggctgtcgatatgcttttgttgttcgattttgtttcttgtttcctcaattttgaccggcgtatcattagcgagtagtgcgatttgctgctggctctcaaggctaacgaagacgcgagcgccttgggagatgtcgctgacgatttggatcgactgtcggttgatctcgattcgtagcgcgtagggcgcaatagagaagcgtattgcgccgccccaaatcgatcggccggttactctgcgttaatctgccctacgagccacgtttggccgctcatcgggcctccaccactggcaataggttgc

SEQ ID NO: 1545 - DNA, 140 bp, Protomyxzoa rheumatica
ggcctggagtttcgcgctctgcatctattgggtatggacacaataaagagatttccaaagaaccagcgcaacgtggcatacacagcagttacacgcgcgaaaacttcgttggcgatctatcacagcaattctctgcctgg

SEQ ID NO: 1546 - DNA, 163 bp, Protomyxzoa rheumatica
tcgagttcattccattccattccattctattcctttacattccatttgattgcattctgttgcattccaatcgattcctttagatttgagtccattccatttgtgtccattccattccaatctattacattccagtccattccattccagtccattacattcg

SEQ ID NO: 1547 - DNA, 296 bp, Protomyxzoa rheumatica
agctcacattttacttcaccattccattccattccattccattccattccaccccattccgttccattctcttctttcaacaggatatcactgtgtcaaaaaaggctgcaatacagtggtacaatctcagctcacattttatttcagcattccattatattcctttcctttccattccattccatcccactccactccattccattccactccaatcccctcccctcccctcccctccattccgttccataccatcccattccattgcattccactccattccactccactccaat

SEQ ID NO: 1548 - DNA, 253 bp, Protomyxzoa rheumatica
tccattccattcgtttccattccattccactcctctcagttccattccactccaattcattccattccactccattatgttccattcctctacactgcattccattcaattccacactactcgattacaatccattccattccaattctctccaaacaattccattccactccccttcactccattgcattccactccattctactccactccactccattccattccattccattccactccattccattcc

SEQ ID NO: 1549 - DNA, 149 bp, Protomyxzoa rheumatica
ttcgaaagtgcgatcggcgataaatctccccgcagttttggtcgcccttgctcaaggagggcgctatatcctcccggtccaaacgccgtctgatctaaaagttcggcatgaaatggttcaagtaatcgagggagatcggaagagcggtt

SEQ ID NO: 1550 - DNA, 396 bp, Protomyxzoa rheumatica
ccattcgactccattatatttgggtccattccattccatttcattcgatgccattccattcgattctattccattctagtccattccattccattctatgccattccattcgattctattccattcgtctccattccattctctccgttccatccgagtccattccattgtattcatttacattccatttcattcctttccattctattcatttccattacattcgattccattcctttccagtccttttcattcgagtcctttccatttgattctattctttctactgcatttcattcgagtccattatattccattccattccattccattcagttccatttgattccaatccattcgattccattttgttccagtccattccattcgagtcca

SEQ ID NO: 1551 - DNA, 132 bp, Protomyxzoa rheumatica
tgtgaagttttatagtttgagtgtagagttttagttttgtttgattattttttgttgtgtatttgtgattgtgaagtttttttatctgtcgtgtttgtgtatttggtgcgagtatttttgtcttgagaagag

SEQ ID NO: 1552 - DNA, 265 bp, Protomyxzoa rheumatica
aatgaactggaatggaatgaactgtaattgaatggtatcaaagagaatggacacggatgtaatggattcgaatggaattgactcgaatggaatggagttggatggaatggacttgaatggaatggaaacgaatggaatggaaaacaatggcctcaaatggaatagaatggaaggtggtgaagtggaatggtgtggagtggaatgggctggaatggagtgcagtggaatggaatggagtgggttggaatggaatggaatggagtgg

SEQ ID NO: 1553 - DNA, 161 bp, Protomyxzoa rheumatica
gaatggaatagaaaggaatggaattgaaaggaatggaatagaagggaatggaattgattggaatgcggtgaagtagagtggagttgagtggattggagtggaatggaatggagaggaatggaagtgaatggagaggactggagtggaatggagtggaatag

SEQ ID NO: 1554 - DNA, 293 bp, Protomyxzoa rheumatica
atggaatggaatggactggaatgtaatggaattgtatggacaggaatcgaatggcatcgaatggaaacgaatggagtgtggcgaaatggagtgaagtggagtggagtggaaaggaatggagtggaatggaaagtagtggcatggaattgaatggagtggagtggagtggaattgagtggaatggaatggaatggagtggaatagagtggaatggagtggaatggaatctagtggagtggaatgcagtggagtggaatggaatggactcgaatggaatggacccgaatataatg

SEQ ID NO: 1555 - DNA, 160 bp, Protomyxzoa rheumatica
ccattccattccactccattccattcgagtccattccatttcatttgagtccattcctttccattccattctattccatttaagtccattccattcctttacagtccattccatttcaccctattccattccattcatgtccattccattccactcgagc

SEQ ID NO: 1556 - DNA, 156 bp, Protomyxzoa rheumatica
cttctcatttgattccattccactccattcccctccactccaatcaactccattctattccattccactccactctatcccactccactccactcctcttcaccgaattccactcgattccattcaatttcattctattcctattgattccattcc

SEQ ID NO: 1557 - DNA, 147 bp, Protomyxzoa rheumatica
tcatgcactgatcacgtagctatcttgcactgatcacttggctgataatacactcatcacgggactgattgtgcactgattacggtgctatcatgcattgactacatgactccacatgcactcatcacgtggatgatcatgcactga

SEQ ID NO: 1558 - DNA, 318 bp, Protomyxzoa rheumatica
catttcccttcctttcccttccattactttcatctccattccactccactcctctacataccactaaattccattccattctattccattccactctgttccattccattgcgttccataccgttgcattccaatcctttcaactccactccattccattctattccattccatttcattccattctgttacacttcactccactgcactacattcccctcctctcccttccattgcattccattgctttacattccattccattgcattccattcctttccattccattgcattccattccaatccattccattcca

SEQ ID NO: 1559 - DNA, 134 bp, Protomyxzoa rheumatica
attccaatccattgctttccattcctttccattccattcccttccattccatttcactcgggttgattctattccattccattccattccattatattacattccattctagttgattccattgcattccatgc

SEQ ID NO: 1560 - DNA, 146 bp, Protomyxzoa rheumatica
cgtttgaatcttatcttttcctcttaacttgacaaacaagctagttcccccatattattgaaaacattgttcttttaaatagttgcatctggcacaggcttttaaagttactgaatccgtgcatacacgtaccaatgtctacctat

SEQ ID NO: 1561 - DNA, 145 bp, Protomyxzoa rheumatica
atgatgtttccattcgattccattcgatgatgattccattagattgcattccacgatgattccattcgagttcattcattgatgattccatttgagtccgttcattgatgattcctttggtttttgtacgatgcttctatttgat

SEQ ID NO: 1562 - DNA, 177 bp, Protomyxzoa rheumatica
ggaatggaagggaatggagtggagtggaatcgtatggagtgtaatggaatggaatggagtggaatggaatggagttgagcggagcggaatcgagtagaggggaatggagtagagtggaatagaatggaatggtgtgtggtggaatggaatggaatggaatggaatggaatggaatgg

SEQ ID NO: 1563 - DNA, 130 bp, Protomyxzoa rheumatica
ctcaacattccatttcattccactccactccattccacgccactccactccattccattaaattccatttttttcaattccactgtattccattcctttctttcctcgccactctactccattccattcc

SEQ ID NO: 1564 - DNA, 148 bp, Protomyxzoa rheumatica
ttccattccattccattccattccactccactccactctattccattccattccacttctttacatttcgttgcattcaactccattcgactacattccactgcactccattccactcctctccactcctttccactccattccattc

SEQ ID NO: 1565 - DNA, 162 bp, Protomyxzoa rheumatica
gactgcattccattccattccgatccatctaattccattccgttcttttcctttccattccattcaaatccattccactctattcctttccattccattcaattccattccactggtatccattccatttgagtccgttcgactccagtccaatccatgtga

SEQ ID NO: 1566 - DNA, 486 bp, Protomyxzoa rheumatica
atggaatggaatggaatggaatggaatggaatggattggagtgaaatggaatggaatgggaaggagtgcagttgaatggagtggagtggagtggaaaggaatggaatggaatggaatggaggggacggaatggaatgtaacggaatgtagaagaggggagtggagtggaatgtaatggagtggaatgtagtggagagtagtgatttgaatggaatggggtggaatggaatggaatgcagtcgaaaggaatggagtggagtggaatggcatggaatggagtagaatgaaatggattagaatggaatggagtggaatggaatggaacgtattgtggaggaatggaatggaatgaaatggagtggaatggagtgaaatggagtggaatggtgtggagtggaatggaatagattggagtggattggtgtggaatggagttgaatggagtagagtggaatggaatggagtggaatggagttgagtggagtg

SEQ ID NO: 1567 - DNA, 157 bp, Protomyxzoa rheumatica
cccactccactccattccattccatagcactccactcgattccactccactccactccaatccattcaattctagtccaattcatttcactgcattccatttcattctattccattccgttcaactccattcaattccattccactccattccatgc

SEQ ID NO: 1568 - DNA, 199 bp, Protomyxzoa rheumatica
ctccactccaatccattccactccactccattccattccagtccactccactccattccattccattccagtctgttccattccactccactccacaccgttccattccattcaactacaccccgtgccactccattcctttcaaatcctctccattccgtgccattccacaccattccattccactccattccaatcc

SEQ ID NO: 1569 - DNA, 162 bp, Protomyxzoa rheumatica
cattcgagtccattccacttcagtctgttccattggagtgcattacattccagtccattagatttgagtccattccattccattccatttgatatattttcataatagtccattcaattcaattccattccattcaattccatttcaattgattccattcca

SEQ ID NO: 1570 - DNA, 136 bp, Protomyxzoa rheumatica
tccactccactccgctccactccacgccactccattccagtcttctacaatccactctactctgcttcgttccatttctttccattgtgctctgttccattctgttccattccacaccattccattccactccact

SEQ ID NO: 1571 - DNA, 144 bp, Protomyxzoa rheumatica
agagagagagagagcaatgacagctttgacccaagagaaaagttgtgatccttcgacttaaattagctggcaccatttctccttttatatattctttgttaaagtatatattctcttgctatagctaagtttaaatcaatctcg

SEQ ID NO: 1572 - DNA, 177 bp, Protomyxzoa rheumatica
tgttcatctaggtgatgtaacccttgtctaggctctctctacaaggatttgtgtgacgtatctctgcgctggtcacctagatgatgtaagccttgtatgggtttgcctatagaaggctttgtgacagatctatgcactgatctctgaggtgatgtaactcttgtctaggcactgcct

SEQ ID NO: 1573 - DNA, 126 bp, Protomyxzoa rheumatica
tgattccattcatttccattagatgacgattccatttgattccatttgttgattatttcattcgattccattcaatgatgactcaattccatttcatttgacgattctatttgattccattcggtg

SEQ ID NO: 1574 - DNA, 142 bp, Protomyxzoa rheumatica
gctgagattctgccactgcacaccagcctgtgtaaccgagtgagatactgttgaaaaaaaggaatggaatgcagtggagtggaatggaatcaaatggacaggaatggaaaggaatgaaatggggtggaatggcaggaaatgg

SEQ ID NO: 1575 - DNA, 162 bp, Protomyxzoa rheumatica
aatcattgaatggaatcgaatggaatcatcatcaaatggaatcgaatggagtcatccgatggaattgaatggaatcaacattgaatacaatcgaatgcaatcatggaatggaatcgaatggaatcatcatcacatggaattgaatggaatcatcagcaagtg

SEQ ID NO: 1576 - DNA, 126 bp, Protomyxzoa rheumatica
aggaatggacgtgaatggaatgaaaaggaaaggaatggaccccaacggagtggaatggaatttaattgactcgaatgaaatggaatacaattgacacatatagaacggaatcgaatggaatggaaa

SEQ ID NO: 1577 - DNA, 312 bp, Protomyxzoa rheumatica
ttctttctttctttcttttgtttctttcttgcttgctttcttgcttgcttgctttcgtgctttcttgttttcttgctttctttcttttgtttctttcttgcctgctttcttgcttccttgttttcttgctttcttgcttgtttgctttcgtgctttctttcttgctttcttttctttctttcttttctttttctttctttcttgctttcttttctttcattcattcattctttctttctttcctttctttctttctttctttctatctttctttctttctttctttctttctttctgtttcgtccttttgag

SEQ ID NO: 1578 - DNA, 184 bp, Protomyxzoa rheumatica
ggaatcgaacggaatggagtgcaatggaatggaatggaatggaatgaaatgggatggaatggaatcaaaccgagtggagtggagtggaattgtatgtaatggaatggaataaactgcaattgaaaggaatggaaaggaatgtaagggaaacaaccagagtggaatggaatggaatggaatggaa

SEQ ID NO: 1579 - DNA, 125 bp, Protomyxzoa rheumatica
tggaatgaggtggagtggagccgagtggaatggaattgaggggagtcttgtggagtggagtgatgtggagtggattggagtggaaaggaatagaatagagtggagcggagtggagtggagtggaa

SEQ ID NO: 1580 - DNA, 205 bp, Protomyxzoa rheumatica
agcccttgcttctctatggaatgccagaattcgctccaccttatgtacgtgaaatctgttagatcgctgccgacttcaataaatcgccccaaccgctcaatattgcgaggcatcgacagtatttcgctaccgattcgcttcaaccaattcgcgacagttgtagggaatcgaagctcagtagaggcgatttcgccaagcgtttctg

SEQ ID NO: 1581 - DNA, 221 bp, Protomyxzoa rheumatica
agcgctgataaccttcgtcttcctccatatagccaatcgtatagatatgcaccatgagtgacacactggtcaccaccaacatcatcgtggctgtcagggtatcaatcaggaaaccgacttcaaacaccaaagtgcccacaacagcccattcatagagggtgccgttgaaggtattgccctccatcacgtccatgaacaccagaatggaagcaatcagggaa

SEQ ID NO: 1582 - DNA, 123 bp, Protomyxzoa rheumatica
cgtggtcatggtgtctcccgaaatgaatctgtttggcgcgcaaaatcgtgcgtcgcgagcaacccgcggaagcatcatgagcaacatcgccggtgtcgcgatgtgatcgagcgcaaaagtcag

SEQ ID NO: 1583 - DNA, 146 bp, Protomyxzoa rheumatica
aatggaatgggataaattggaatggactggagtggagtggagtggaatagaatagagtggaatggactggaatggagtggagtggagtgcaaaggtaaagagtggaaaggaatggaatgaaatgcagtggagtgggatggagtgaa

SEQ ID NO: 1584 - DNA, 128 bp, Protomyxzoa rheumatica
actccactccattctattctactcaattccactccactacacaacattacattctacccatctctattccactccaatccattccaattcactccatcccatttcactgcatttcattccattccttt

SEQ ID NO: 1585 - DNA, 133 bp, Protomyxzoa rheumatica
atggaaaggaatggtgtggaatggaatggaatgaaatggtttagaacgcaaaggagtggagtggaatggaatggagggaactgcaagtgaacagaatgtagttgaatggattggaaaggaatgcagtgtagtg

SEQ ID NO: 1586 - DNA, 144 bp, Protomyxzoa rheumatica
agccaatttctaattatttattcaagcccaaagcctaattccacccctgagtgtggtggttctgagctgctgcactccctgtgtagagccagagccagagcgtggtgggggtgagtggccaacactggagcgcatccctggaca

SEQ ID NO: 1587 - DNA, 100 bp, Protomyxzoa rheumatica
ggaaggggcagctcctcctccaggaaaaagaggatctgggggagaggagcaacaccacagggaaggggcagctcctcctccaggaaaaagaggatctggg

SEQ ID NO: 1588 - DNA, 324 bp, Protomyxzoa rheumatica
cactccattccattctattccatttctttccaatccactccactccattcaattccattccttcccgttacattcaattccactccattcctctccactcctctccactccattcaattgcattccaatcctttccattgcacacccctccactgaacatcactgcattccattcgaatccttacgatgccatttgtttccatttcatttgatttcattcgataccatttgattccaatccatttgattccattccatttgattgtattccatttgattcctttcattcaattccattctatgtcattcctttccattcgaatc

SEQ ID NO: 1589 - DNA, 346 bp, Protomyxzoa rheumatica
agtccattccattcgagtccattctattccagtggattccattcgagaccatttcattccattagattccattccattcaatacttccactcgattccattccttttgattccattcccttcctttccattccattcgattccattccatttgattccattcctttccactgcactccacttatttccactccactccattccattccattccactccaatccattccattccataccactccactccactccactccattccattgaattgcattccactacactgtactccactccacacgattccatccctttccattgcactccactccactccataacact

SEQ ID NO: 1590 - DNA, 352 bp, Protomyxzoa rheumatica
tggaatggaatggaatggaatggattcaactcaaatggaatcatctcgattgcaatggaatggaatggaatggaagggaatagaatggaacagaatggattggaatagaatggaatggaatggagtggatgcaaatggaatggaatggaatggattcgaatggaatagaatggaatttactggattggaatctaacggaattgactctaatgaaatggaatggaatggactcaaatggaagtgaatggaatggaatggattcgaatggaatggaatggactcgaatggaatggaatggagtggaatggaaccgaatggaatgggatggaatggaatggaaaggaatggaaat

SEQ ID NO: 1591 - DNA, 132 bp, Protomyxzoa rheumatica
tgaatataatggaatggaaaggagtggaatggaatagagtgtagtagagtggagtggaatggagtggattggagtctaatggagtggaatgaagtggaatggagtttataggagtggaatggagtagcgtgg

SEQ ID NO: 1592 - DNA, 173 bp, Protomyxzoa rheumatica
gaacactcacacaaacacctttttgtggtcatggtcgctttgctttgatttctaaattcctgcttcagttcatcacaggcgctgggacgtgcacgtccttccaaagccctcaaagctgtctctgtgtctgctatcatggcaaatgttctggtgccccatgccctgggaaaagg

SEQ ID NO: 1593 - DNA, 175 bp, Protomyxzoa rheumatica
tggaatggaatggagtggaatggaatggaatggagtggagagtagtggagtggagtgaagtggagtggagaggaatggaatactttggagtggaattgaatggagtggagggtagtggagtgaaatggattggaatggagtggaatggaatgggttggaatggagtggagtggtg

SEQ ID NO: 1594 - DNA, 168 bp, Protomyxzoa rheumatica
actccacttcacttcattgcattccattccattccactccattccatttaaatccattccactcatttccactccattcaattgcactccatttcattagattccattccattccgtaccctgtcactccactccactccgttaaattcctttccatcccattccatt

SEQ ID NO: 1595 - DNA, 195 bp, Protomyxzoa rheumatica
caattccagtccgttcgaatcaattttgttccagtcgattacatttgtgtccattccattccagtccattccattcgagtccattccattggagtccattaacttccaatcctttcgattccattccactccattcgagtccattccatttgattcctttccattcgagaccattccattccagtccattccttt

SEQ ID NO: 1596 - DNA, 163 bp, Protomyxzoa rheumatica
attcaattccattccattccattacattacatcacattatattccattgaggttcattcctttacattctattacattccctaccattcccttctattccattccattgcattccattccattccactccagttgattccattcgattccattctattcaatt

SEQ ID NO: 1597 - DNA, 248 bp, Protomyxzoa rheumatica
ctggaatggaatggactcgaatggaatggactggagtggagtggaatcgaatggaacagaaatgaacggaatgaaatggaatggaattgaatggaaaagtgtagaatgtagtggaatcggttggaatggaatggaatggaatggcgacgaatggaatacaaacgaatgaaatggaaaggaatgcaattgaatgtaatgcaatggaactgaatggaaaggaatagaatggaatggaatcggatggaatg

SEQ ID NO: 1598 - DNA, 174 bp, Protomyxzoa rheumatica
cattccattccattccattccgttcctttcccctccattctattccgctccaatccactcgattccctttcattccattccattccttccattcctttccattcaattccattccatttcattccactctactacactccactcccttccgctccgttcaattccattccattc

SEQ ID NO: 1599 - DNA, 134 bp, Protomyxzoa rheumatica
actccattacattccattccactccaaccggatttattcctttccattccattccattctaattgattccattggattcgattccgatccattccattccattctaatccactccattacattacgttccattc

SEQ ID NO: 1600 - DNA, 220 bp, Protomyxzoa rheumatica
tcgaatgggatggaatcgaatggaatggacaggaatggaacggactgtagtggaatggaacggaatggaatggaatggaagggaacagaatggaatggaacggattggagtggagtggaatggagtggaatggaatggataggaatggagtggagtaaacgggaatgtagtggattggaatgcaatggagtggattagaatggattggaatgttacggaa

SEQ ID NO: 1601 - DNA, 192 bp, Protomyxzoa rheumatica
actccactccactccacacagttcagttacattttgtcacattccattacattccacctcattccattcctctccattccactccacacctctccacttcacctcatgccattcgattccattccatgacattcgataccatttcattcgtttccattcctttcgtttctattccattcgattccattactc

SEQ ID NO: 1602 - DNA, 155 bp, Protomyxzoa rheumatica
attccattccattccattccattccattccattccagtacgtttgattccattccattacgttcccatccattccattcagttccatttcattgatttacattccattccattctgttccattccactccactctactcgggttgattgcatttc

SEQ ID NO: 1603 - DNA, 176 bp, Protomyxzoa rheumatica
tgagaaaaatggagattattgtattttgataaaatattctctcttttctagttattttgatataaaactcgtaatatagcctcaatatttttctaatataaacaattctagcaataatgtaatatcaaatttattttattttttgacaaatgtaaaatatttttgtgaggttttag

SEQ ID NO: 1604 - DNA, 128 bp, Protomyxzoa rheumatica
aatggaatggaatggaatggaatggattggagtggaatggtatgaagtggaatggaatgcagggcaatggaatggagttgaatgcattggaatagagtggagtggaatggagtagattggaatggaat

SEQ ID NO: 1605 - DNA, 202 bp, Protomyxzoa rheumatica
cccaatttgtgatatatcaaaaatctgcataatgtggattgtttctggacttttttttctactacttgatgttttcttagttcctagactaatactattgtcttatttatcaaaagactataataatttataatatttgatgatgcaattcccttttcctgttcttcacaggaatgtcttagaaaattctggcactttctct

SEQ ID NO: 1606 - DNA, 124 bp, Protomyxzoa rheumatica
ccattcgaatccattccattccattccattccatttcattaaattatgctccattccatgccaatccattcgattcattttgattcaattttattccattcgattccattccgttcaattccat

SEQ ID NO: 1607 - DNA, 125 bp, Protomyxzoa rheumatica
aatggacacgaatggaatagaatgtgatggactcgaatggaatggtgttgaatggaatggagtgttatggactcgaatggattggaattgaatggactcttctggaatggaatggaagatcggaa

SEQ ID NO: 1608 - DNA, 125 bp, Protomyxzoa rheumatica
cgttatattttttttttaaattaattatttttggtgctaatttatattttaaaatcaaaatataaatcatatatatcatacaccatgagaaaaataaattaataaaaaaaattatttattttagt

SEQ ID NO: 1609 - DNA, 193 bp, Protomyxzoa rheumatica
caatttcattttttccattcgattcaattcaatttctttcgattcaattcaaatcctttcgattccatacaattcgatttgatttgagtagatttgattcaaaaccattggattacattcttttccattcgattccattcaattccatttgattccattccattcgattctgttccattccattccactccat

SEQ ID NO: 1610 - DNA, 181 bp, Protomyxzoa rheumatica
ggaatggaatggaatagaatggaatggaatggaatcgaattgaatcgacttggattgaatcgactccaaatgaatcgaaactaatcaaatggaatagatcggaattgaatggaaacgaatgaattcgaataaaatggaatcaaatggcattgaagtgaatcaaatgtaatacggtgaaacg

SEQ ID NO: 1611 - DNA, 144 bp, Protomyxzoa rheumatica
cccattccatatgctgtttctcaacatgatgtttccctttacataagtcaggcatatttttccttctatttaatctgagtataaatgaggacatagacagtagccctagctgagcttctatcccacagtcaacaccaaactcca

SEQ ID NO: 1612 - DNA, 158 bp, Protomyxzoa rheumatica
gattttttcctcactcaatcatgttactatttgcacgttaaacttatatgagcatcctagttattcatatgtattcattctcactttcttactctttcacagactgtctttcccttatgccttttaccacaggtacctaaacttttcatgattttgcc

SEQ ID NO: 1613 - DNA, 140 bp, Protomyxzoa rheumatica
cgaggagagcatcatttgcctctcccccacaccgcgccgatcaacgcaataatttcctcattcacaccggcgatcgattccatcgcgcgatcgtacaccgagcgccctaccgaaccacgcgagagctcgtacagggactg

SEQ ID NO: 1614 - DNA, 122 bp, Protomyxzoa rheumatica
cattccattccattccattccattccattccactccaattgggtttatttcattgcactccattccattccattcctttccatccctatacattccattccattccattccattccactggt

SEQ ID NO: 1615 - DNA, 144 bp, Protomyxzoa rheumatica
atgcagtcattattgaatggaatcgaatggaatcatcattaaatagaatcaaacggaatcatcaaatggaatcgaatggaatcattgaatggagtcaaattgaatgatcgaatggaattaaatagaatcagcatcaaacgaaat

SEQ ID NO: 1616 - DNA, 310 bp, Protomyxzoa rheumatica
tggattggagtggagtggaatggaatggagtggaatggagcgaaatggaatggagtggaatggaaagaataggagtggagtggaatggagtggagtggaatgaactggaaaggaatggagtggaatggagtgaaatagaatgtagtggaatggaaggaagtggagtggagtggaatggagtggagtttaatgaactggaaaggaatgaagcggagttgaatggaatggagtggcgtggagtggattagagaacaacggaatggaatggaatgaagtggagtggagtggagtgcaatagagtggagggtag

SEQ ID NO: 1617 - DNA, 267 bp, Protomyxzoa rheumatica
atggaatggaattgaatggaatcgaatagaatagaatagaaaggaatggaatggaatagatggtagtggagtggaatgtaatggagtggagtggactggaatgtagtggagtggaatagaatggagtggagaggagtgcagtgcagtggaatggaatggaatagaatggaaaggaatggaatagaatggaatggaatagaatagaatgaaatggagtggaatcaaatggagtggaagggaatttagaggagtggaatggaatggagt

SEQ ID NO: 1618 - DNA, 152 bp, Protomyxzoa rheumatica
ttccattacattccattacattcgtttccattccactcgagtccattgcactccggtccattccattcaagtccattccattccagtccgttccatttgattccattccattccattgcattcgatatctttccattacactgcacttcatt

SEQ ID NO: 1619 - DNA, 254 bp, Protomyxzoa rheumatica
ggaatgggtggaatggaattgaatggagtggagtgaactgtcttggaatggagtggaaatgaattgaatgggaaggaatggaattgaaaggaggggagtggagtggagtggaatgcaatggaatgtaatggaatgacgtggagtggagtggagtggaatgcaatggagtggagtggaatggattggagtggaatagaatgcaatggaatggaatggagtggaatggaaaggaatggattggagtggagcgcagt

SEQ ID NO: 1620 - DNA, 132 bp, Protomyxzoa rheumatica
ggaatggaatgcaaaggaatggaatttattttaatgtaagggaatggaatggaaatgaggggattggagtgaaatggcacggaatggaaaagactggagtggaatggaatggaatagaatggagtggagtgg

SEQ ID NO: 1621 - DNA, 159 bp, Protomyxzoa rheumatica
cacttttagctggggtaaccaggaacaacataacagagtaagtgggattctattggaacttggcatttgcggcataggaggatgactactcagtctgaggcattcctcaacacacacaagtccatggaattcctcttaatggaaggttgaacttgatac

SEQ ID NO: 1622 - DNA, 145 bp, Protomyxzoa rheumatica
ccattccattccattccattccattctctgatgccattccattcgattctattccgtttgactccatttcatttcatttcattccatctgattccattccattctattcctttccattctattccattccattccattcctttcc

SEQ ID NO: 1623 - DNA, 216 bp, Protomyxzoa rheumatica
aatgaagtggaatggaatggagtggagtggagtggagtggtgagaaacgaaatggaatggaatggagtggaggggagtgaagtggattggaaaagagtggaatgtagtgaagtgaagtggatttgaaaggaatgtagttgagttaaagagaatgcggtggaatgcaatggaaaagaatggaatggaatgaaaaggaatggaatggaatggagtgaa

SEQ ID NO: 1624 - DNA, 205 bp, Protomyxzoa rheumatica
tggattggagtggaggggaatgaaatggagtggaaaggagtggaaagtagaggagtggaatagaatgtagtggagtggaatagaaagcagtggaacggaatggaatggaatgaagtggagtggagtggaatggattggaatggaatacagtggaatgaaattgagtggagtggaatggagtggagtggagtggaaaggagtgaag

SEQ ID NO: 1625 - DNA, 457 bp, Protomyxzoa rheumatica
cattccattccattcccatcaactccaccccactccactccactgcactccattccattccattgaattccacttcactcaactccattccactccattccattccactccaaacatctccattccactattttccgttccactccaatccattccaatccactcctttccactcctttcaaatccagtccattccactccactgcaatccattaaattcaattccactcacctccattccactccattttattccaatccactccactgcattccactgcatttcattccacttcattccattctactccattactccattccattctactccattccatttgactccattccattctattccattctgttctattccattccaatccactccactcaactccactccactccatagcattccattccattccattccattccattcaattccatt

SEQ ID NO: 1626 - DNA, 151 bp, Protomyxzoa rheumatica
cgaatggaattgaaacgaatggaatgcaattgaatagaatggactctaatcaaatcgaatgtaatcaaatggaatggaatcaaagggaagggagttgaatggaatggaatgcaatggaatggaaatgaatcgaatggtgtggactggaatg

SEQ ID NO: 1627 - DNA, 124 bp, Protomyxzoa rheumatica
actccattccattccgttccatttattaccgttccattccattcaggtcgagtccattccattccactccattccaatcgagtccattccattcttttatactccattccatttgagtctattc

SEQ ID NO: 1628 - DNA, 613 bp, Protomyxzoa rheumatica
ctccattctattccactccactccactccattccattccagcccactccaatccactccactcttttccagttcactcaattccattccagtcccttccactccacaccactctattccaatacactcctttccattccactcccctccagtgcattccattccattccactctgttccaatatgtccatttcattccactcccctccactcaattccactccacttcactccactgacatccttttcactccactccattccattccactccactcctctccactgcattccattccactccactcgaatccactctggtttactccactccattccattccattccaccccactgcattccattccattccactccactccagtgcactccactctactccattcctctccattccattcctctccactatattccattccactccaccccattccattccgctactttcctctccacaacttcattccccttcagtgccatccattccactccactccaatgcagtccactccattttactccaatccattcctttccaaaccactctattcctttccattccattccattcctttccattccattccat

SEQ ID NO: 1629 - DNA, 159 bp, Protomyxzoa rheumatica
aaacatggccccggtgcatctggcgatttctttgatgtcaaaagtgcgaattgagggaatgttgtcttttccgaactgatgaggcctccgttcgaaatagagccgtcgctcctcatcgtcagttctcgcattgaagtatcgttcgatcgttttgatgct

SEQ ID NO: 1630 - DNA, 134 bp, Protomyxzoa rheumatica
ctcgaatggaatttaaaggaatgcacacaaatggaatggaatataatggaatgcaatgtaatagaatataatggactggaatggaacggaatggtatggactggaatgggcttgaatggaacagaatggaatgg

SEQ ID NO: 1631 - DNA, 151 bp, Protomyxzoa rheumatica
tgatacaattcgattccattcaatgatgattccattcatgtacattcgaggattccatttgatttcattcgatgatgattccattcaagtacattagatgattacatttgattccttttgatgatggttccatttgatgccattcaatgat

SEQ ID NO: 1632 - DNA, 159 bp, Protomyxzoa rheumatica
tggaattgtgctaggtctgggcagtggtggtccccggcccaccccaacccctgttttagatgggtcatgcactccacagttgaccactgtctcattatctccagccctaagggtcttttgccagttatccttgcacttgctctgtgttcctctcacttg

SEQ ID NO: 1633 - DNA, 173 bp, Protomyxzoa rheumatica
ccaatacattacactccactccattgagttctgttacaccccatttcattccattgcattccactccacttcacttcaccgcattgcattcgaatccatttgatgccattcgattccattccactcgattgcattccattcaaatccattccaattgactccattccatacga

SEQ ID NO: 1634 - DNA, 126 bp, Protomyxzoa rheumatica
ccactccacttcatcgcattccattcaattacatttgatgtctttcgattccattccattccattccataccatttgattccattccattcgatttgattcgtttcaactccattccattccattc

SEQ ID NO: 1635 - DNA, 395 bp, Protomyxzoa rheumatica
aatagactgaatccgagtggaattgaatggaatggaatggattggaatggaatggaagggattggaatgcaatggaatggattcacccgactggaatgtaatggttaggaatggagtggaatggaatggaatggaatagaatcaaaacgaatggaatggaacggaatggaatcgaatggtatggaatggaattgaatggaaaggaatcaccccgaatggaatggaacagaatggaatggaatggaatcaaccagcgtggaatggaatggaatggaatgcgatggaatggtacagaatggaatggaatggaatggaatcatcccgagtggaatggaatggtatggaatgcagtggaacataacggaatggaatggaatggaatagactgaatccga

SEQ ID NO: 1636 - DNA, 135 bp, Protomyxzoa rheumatica
atcagaaacaatgttattcagcattattatcttaggcatttgcagaaagaatttcattaacttaatctgtgatgccttccattgttataaaaccattgaataaaggtacatgaaagactattgctggagaataaa

SEQ ID NO: 1637 - DNA, 368 bp, Protomyxzoa rheumatica
taatcagttcgattccattccattcaattcgagtcaattccattcaattccattccatttgattcctttctattcctttctattccattcgagtccattccattacattcaattcatgcccattccattcctttccattccattcgtgtgttttcctttccacaccattctattgaagtccattacattccattgtattacattctaatccattcccttccattccattccattcgggtccattgatttcaactccattcaggtcaattccattccattccattcgaatccattccattccacaccattccaatacattccattcacttgcattcgagtccactccattccattccactccattccat

SEQ ID NO: 1638 - DNA, 325 bp, Protomyxzoa rheumatica
tgtaatggaacggaatggaatggaacagaatggaatggaaacggaatgcaaaggaatggaatggaatagtatggaatggaatggaaaggaatggagtggaatagactagagtagaatggaatttactcgaaagcaatggactggaatagaactttcttgaatgggctggaatcaaacggaatggaatgctgtgcaatcaaatagaatgaaagagaatcaaatccaatcgaatggattggaaaggaattgactgaaatggaatggactagaatggaaggcaaaggaatggaatctataggaatggactgtaatggaatggaatgga

SEQ ID NO: 1639 - DNA, 146 bp, Protomyxzoa rheumatica
cttttagccctagctataggaaggtgttctagggggccggacaacgtcaccattcactatttagagagggctcaggagaacaatccgattcggtcttatgttgctcttctggtgacggatatggcagaaaattacgcaaaactact

SEQ ID NO: 1640 - DNA, 142 bp, Protomyxzoa rheumatica
caattaaaatggtttaaactaacaaaaaaacgatttaaaagaagcttaatatttttataatttatttgggatatgacaaaggtccaattttcaatgaaattttttataaattttaggaaatatatttcattagttgacaaaa

SEQ ID NO: 1641 - DNA, 331 bp, Protomyxzoa rheumatica
tggaatggaatggaatggagtggaatggaatggagtggaaaagaatggaagggaataaaatagaatggaagggaatggaagagaatgcaatggaatggaatggaatggaatggagtgaattggaatcgaatggaattgattggaatgtaatggaattgagagaagtggaatgaaggcaatggaatgcaatggaatgaaatgagaataagtgcagtggaatgaaatggaacggaatggaatgtagtggattggagtggagtggagtggaattgaattgaatggagtgcagaagaatggactggaatggaatggaatggaatggaatggaatg

SEQ ID NO: 1642 - DNA, 235 bp, Protomyxzoa rheumatica
atccagcaagctcttttcagacgattcagcgtcagtttgatttccgcgtaatgtcggaagctcaaccccgccaatcgatgccaatatcgctgaggctagatcgaagggctcgtctccaaaatcgcttgttggattgtcgccttgatattccttcattctggaagcgagcaatgaagcccgtctctttagttgcactaccgagagacccgctaattcggccggtggaggagggaac

SEQ ID NO: 1643 - DNA, 157 bp, Protomyxzoa rheumatica
gcgagacaaagggcagaaaggccgaaattgcaaacggttctttgggtcatggtgattctcggaatgataattgctgccgccggtggcattggcctttggcgcatgcgtggtgcggctactcctggagtcggagatacgacaagaggaggaaaaccta

SEQ ID NO: 1644 - DNA, 165 bp, Protomyxzoa rheumatica
aatggaatggattggacctgaatggaaagtaatggaatggaatggaccttaatggaaagtaatggaatggaatacaatggactgtaaatgaatcgaatgcaatggaatggaatgtaaggtaatggaaaggaatggaaaggaatggacttgaatggaatagattgg

SEQ ID NO: 1645 - DNA, 166 bp, Protomyxzoa rheumatica
tcgaatggaatcatcattgaatggaatctaattgaatcatcgaatggaattaaatggaatcatcaatgattcgaattgaatggaatcatcactgaatggaatcaatggaatcatcaaatggaatctgatggaatcatcattgaatggaattgaatataagcatcaa

SEQ ID NO: 1646 - DNA, 158 bp, Protomyxzoa rheumatica
gaaaaatctttaaatccacctataccctgtaagccacccacttcaagatatctcaccttttcagatggaaccaatggtcactttccatatttcgatttatgatgttacctacaattcttgtcaccctaaaatgtataaacccaaactataacccaacc

SEQ ID NO: 1647 - DNA, 122 bp, Protomyxzoa rheumatica
gttgaacccgcattcataagccgagagtttttccggatctggctgctgataggcgacggcgaatggcgccaccaagagcacaaagctcagaccagccgcaaccacaataaacacgacgattg

SEQ ID NO: 1648 - DNA, 155 bp, Protomyxzoa rheumatica
gtgaatgagattgtgagtgagtctgtgagtgagattgtgagtgagatcatgagtctgtgagtgtgagcatgagatcgtgagtctgagtgagatggtgagtgagattgtgagtgagatcatgagtgagtgacatcgtgagtgagatcgtgagattg

SEQ ID NO: 1649 - DNA, 130 bp, Protomyxzoa rheumatica
cttctgttccgttcgattccaatcctttcagttccatttttttccaatccattccattcgagtccattccattaaattcccttcccttccgttccgttcgattccaatcctttcaattccattttttttc

SEQ ID NO: 1650 - DNA, 122 bp, Protomyxzoa rheumatica
actgctttcaattccattcatttccatctattcgattccactccatttgactgcattccattcgagtatattccattccattcaagtatgttccattccattcctttccattctgttccgtt

SEQ ID NO: 1651 - DNA, 129 bp, Protomyxzoa rheumatica
atttcattccattccattccattccattcgatgccattcaaatcgactccattccattccattcctttctatctgattccattcctttttattcctttccattccattccattcctttccaatccattc

SEQ ID NO: 1652 - DNA, 138 bp, Protomyxzoa rheumatica
taaaaaaaaaaaaagtctttatcaccatattgtacatactgatttctaaccattgcagtggttcccctaagatgagatagcacatttcaataaatacaaaagaatcaaaaagaatcaaattattctttttgattcttt

SEQ ID NO: 1653 - DNA, 129 bp, Protomyxzoa rheumatica
cctcaccactccactccactccattccattccattcctttctcttccaatccattccactctgctccaccccactccactccattccactcaaatcaattccattccactccattccactccattccac

SEQ ID NO: 1654 - DNA, 127 bp, Protomyxzoa rheumatica
ataggagtggaaattaatggagtgcaatggagtgtagtggaggggagaggagtggaatgcagtggaatggaatcagatggaatggaatttagtggattggaacggaatggaatggaaaggaacggaa

SEQ ID NO: 1655 - DNA, 249 bp, Protomyxzoa rheumatica
cccttccattcgagttcattccattccattccattccattccagtccatgccttttgagtcaattccattcgattacattgcattccagtccattcttttcgagtccattccattccagtccattccattccattccattcgagtccattccttttgagtcaattccattcaagtacattacattccagtccattctgttcgagtccgttccattccgtttcattccattccattcaataccattccat

SEQ ID NO: 1656 - DNA, 168 bp, Protomyxzoa rheumatica
gcctttagagcggcaacagtctgaagcagtccgctgctcttggcgccgtaaccccaagtttctccgactactgcaagacgggccgggctgcgcttgtggccttctgccatttcttgcacacgctcaacggcccttttgagcgaaataaatggaaacgacgggctgcgc

SEQ ID NO: 1657 - DNA, 135 bp, Protomyxzoa rheumatica
tcattccattccattccagtccattccattccactggggttgattccattccttttcattccatgccattccattccataccgttccatttctgtcgggttgattccatcccaatcttatctgttccactccatt

SEQ ID NO: 1658 - DNA, 167 bp, Protomyxzoa rheumatica
aatggaacagaatggaatggaacagaatggaacagagtggattggagtggagtggaaaagaatggactggaatggaatggtgaaatgaaatgtgagctactaatgtgccactgcactcctgtctgtctgacagagtgagatccagtcgaaataaaggaatggaatgg

SEQ ID NO: 1659 - DNA, 194 bp, Protomyxzoa rheumatica
ccactccactccactcaattccattccactccacaccactccattccgttcctttccattccgttcaataccattctattcctatcaattgaattccattacatttcactccactccattcctttccattccactccactctattcttatccattccattccgtcccattccattccattccactccattcaat

SEQ ID NO: 1660 - DNA, 134 bp, Protomyxzoa rheumatica
ggaatggagaggagtggaatagaatggattggagttgatcacagtgaattgcagagggatggagtggagtttaattgaatggagtgtaatggatttgagtggagtaaaagggaatggaatttagtggagtggca

SEQ ID NO: 1661 - DNA, 195 bp, Protomyxzoa rheumatica
tggagaggaatttaatggaatggaatggaactgaagggaatggaatgaaagggacttgaatgtaatggaattgaatggaatggactcgaaatgaatggaattgaattgacccgaatggaatggaatggaatggaatacaatggaaaggaatggaaaagaatggtatggaatggaatggactcgaatggaatgcac

SEQ ID NO: 1662 - DNA, 197 bp, Protomyxzoa rheumatica
caccctcacaataagcctgatactaaccaagaccctgatgcatacctgaccctattcttcattctggccacccgatacttactctgatccttaacctaaacccgcgtgatattgaccctctatcttgtcccttatcctaaacatgaccctcacactgaccctgatttccacccttatgaagaccctgaccctcaacc

SEQ ID NO: 1663 - DNA, 230 bp, Protomyxzoa rheumatica
actccactccactccattccatttcattccactccattccctccactccactccattccattcaattccattccactcctgtcaattccattccattctactccattccactccattccactccactccatttaaatccactccactccactcccctccactgcattccactccattccattccattccattctactccaatacattccactccattattttgagtggat

SEQ ID NO: 1664 - DNA, 270 bp, Protomyxzoa rheumatica
gtgtaatggagtggaaaagaatgtaatggaaaggagtggagtggagacaatggagtggactggagtggaatggagttgagtggaatggacagcaatcaagtggaatggaatggagaggaatcgagtggaatggagtggaattgaatggaatcgattggagtggaatggaatggagtggagttgaatggaatggaggggagtggaatggaatggactggaatggaacggaacaaaaagaaatggattggagtggaatggaatggaatggag

SEQ ID NO: 1665 - DNA, 156 bp, Protomyxzoa rheumatica
tgtataagtcctctgactattctttttcaaaattctttgcctattctatgtcgtttgtatttccatataagttttaaaattagcttgtcaagttctacaaaaaattttctggaattttatttgggattattttgaatctatagatccatttgggag

SEQ ID NO: 1666 - DNA, 169 bp, Protomyxzoa rheumatica
ttgaattccattccattcccctcctctcgtttccattctatttcactccactccattccattccattctattgtactccacacaattcaattccactccaacccactccattccattgtattccatttcattctattccattccattccattccactccactccattcc

SEQ ID NO: 1667 - DNA, 174 bp, Protomyxzoa rheumatica
cccactgcacctgtcttgcgttgaaagtaaacgtcctttcaaggaaaccctgttatgaaacgtttgctgatcggcgtaattgcacccgccttattcgtacttgcagcgtgcacaaattcgccggaagttaccactcgaaaattgcagtttcttgccaaaactgattgtgagttg

SEQ ID NO: 1668 - DNA, 130 bp, Protomyxzoa rheumatica
tccatcccattccattccgttccattccatttcattccattcgaatcctttccattccattacattcaattcctttccattgcatttcataccagtcgaatcaattccattccattccattccattccat

SEQ ID NO: 1669 - DNA, 155 bp, Protomyxzoa rheumatica
gatatgaatccacgcataacaagacactttcacaggcagcttctttttggtttatatctggggataagcagtttttcctcatatgcctcactgggtccccaaatgtcccaaatgtcacaaatcacaaagccattccacaaatatctcctttctaa

SEQ ID NO: 1670 - DNA, 179 bp, Protomyxzoa rheumatica
tgtgttgattccattcagttcctttccattccattccattccattccattccgtcccattgttttcgtgttgattccattccattccattcctcaacattccaatccattacattccactctggttgaatccattcatttccattccaatccattccattcctttccaatccattccat

SEQ ID NO: 1671 - DNA, 148 bp, Protomyxzoa rheumatica
tggcataccctcagccctctgctctgtggctgaaatgagtttgaatctgagtttgctcatgtcccatggtcagaatgcagaagttgagtggtgttagtttgccagtggaatattttttgtaagggggaggagatttaagcaggttata

SEQ ID NO: 1672 - DNA, 155 bp, Protomyxzoa rheumatica
actgggaagaccatttttataaatttatattaaaactaaaaattatcagtctttttaatgtttgccgatatgatggatggtaaatttctcattattattttacaacatgctttcctgatagtgaacttgtgcacataacaaggtatgtttattgg

SEQ ID NO: 1673 - DNA, 167 bp, Protomyxzoa rheumatica
ccaaatcaaagtcccaaaaatcacaaggagcggcagagcgcagagaaatgtatacttcaagtatcgaaatcgcgccgcgatatagcggtcgttattgatctgttcgagagcttcctcaagccgcctcctagcagcggtcacgtcgttgcgaagcgccattgcgattc

SEQ ID NO: 1674 - DNA, 151 bp, Protomyxzoa rheumatica
gttcctttcaattccagttcactctggttgattccattccattccattcccttcaattctattcctttccatccattccataactttccattgcatttcactcgggtttattccattccattcctttccattccattgcattccactcggg

SEQ ID NO: 1675 - DNA, 168 bp, Protomyxzoa rheumatica
aatagaatagaatggaatggactcgaatggaattgaatggaatagaatggactcgaaaggaatgaaattgaatggaatggaatgatctcgaatttaatggaatggcatggacttgaatggaatggaacggactcgaaaggaatggaatggaatggaatggaatggaat

SEQ ID NO: 1676 - DNA, 203 bp, Protomyxzoa rheumatica
atggaatggaatggaatgaaatggaatgatatggaatggacgggaatgatatggaatgtacgtgaatgaaatggaatgaaatagaatggatttgaatggaatcatatggaatggaatggaatggaaaagaataaaacactcaaatgaaatggaatggaatggactcaaaatgaatggattggaatgcaatggaatggaatgga

SEQ ID NO: 1677 - DNA, 152 bp, Protomyxzoa rheumatica
attctgctccactccattccactttactctaccataatccactccattctaccccactccactgtactctactctactatactccactccattccattttagtccattccactgcactccactccattccactccaatccattacattccat

SEQ ID NO: 1678 - DNA, 181 bp, Protomyxzoa rheumatica
ttccattccattccattccattcgagtccattccattcaattccattccattcgagtccattccattcaatttgagtccatttcattctattcgagtccattccattcctctccattctagtccattgcattccactggagtctattcctttccattcgattatattccattccattacat

SEQ ID NO: 1679 - DNA, 181 bp, Protomyxzoa rheumatica
attccactacaatccattccactccactccattccattccgttccattacacttcactccattccattatattcaattccattcctttccactgcacttttatccactccactcaaccccacttcactccactctgttcccttccgatccattccattccattccattccattccattcca

SEQ ID NO: 1680 - DNA, 155 bp, Protomyxzoa rheumatica
attccactgcattccattcaattaatttccattttattaaattccattcctttccattccactcctctccatctctttccattccatttcattccaatccaatctacttcattacatttcattacactctattacaccccattccattccattcc

SEQ ID NO: 1681 - DNA, 182 bp, Protomyxzoa rheumatica
ccattccattccattccattccattccactcaggttgattccgttcgattccattccaatccattctacttgattccattgcattgcatgctgttccattcccttctactccattccaatccattccacccgggttgattccattccattctttcccgttccattgcattcgactcgggtgg

SEQ ID NO: 1682 - DNA, 152 bp, Protomyxzoa rheumatica
gaaactccatctcaaaaataaataaatacatgtatgtaaaaattaaaaaccatatttttctaaatgagtggggagggttcatttttagatgtaattatcactatactttgtctctgttttggctaatctggcattacaaacagtcccaatag

SEQ ID NO: 1683 - DNA, 143 bp, Protomyxzoa rheumatica
gtgtgtgtgtgtgtgtgtgtatgtctgtccctgtcaggatgtgtttactgtgtgtgtctctgtgtgtctgcatgtgtgtgtgtctgcgtccctgttgggatgtgtttactgtgtgtgtctgtccctgttgggatgtgttactg

SEQ ID NO: 1684 - DNA, 208 bp, Protomyxzoa rheumatica
atggtatggtatggaatggagtgacatggtggggaatggatttgaatggaatggtgtggagtgggatgggatgaagtggactggattggaatggaatggattggaaaggaatggaatggaatggattcgaatggaatggacaagaatttaatagaatggaatggaatagaatggaatggaatggactcgaatggaatggaatggaatg

SEQ ID NO: 1685 - DNA, 324 bp, Protomyxzoa rheumatica
tcaggatcgggctcgggttcaacttcggcaaaggcctctaccatcaccgaacgaagtctctcagcctgttctggtccaatgagagaaccgacgtgaatgaatgcgtccataggagcgcggactttccacacaggcccttcaagatcgaaaggaggatccacctcgtttaggtgaaatctgactttcgcttcaacctgagagcactcaacgcctccagctaggcgtttaacgatgtctctatcctttgaattcgtagaatcccaagcgccggcaagtatcgccgataacaattcatctccgcgccgcgtccaggcgggaggatca

SEQ ID NO: 1686 - DNA, 166 bp, Protomyxzoa rheumatica
ttataatatatagtttgtgtactttcatattttatgtacagaatatactatatagtatgggtacttggatattttttgtacagtacataatataaactttgggtacattgatattttaggtacagtaaatgatatatatttttggtaacttgatattttatgtaca

SEQ ID NO: 1687 - DNA, 147 bp, Protomyxzoa rheumatica
attgaatgaaatcgaattgaatcattaccgaacggactcaaatggaatcattgaaagtaattgaatggaatcatattcaaatggaatcgaatggaatcatcgaatggacatgaatggaataaccatcgaatggaatcgaatggaata

SEQ ID NO: 1688 - DNA, 264 bp, Protomyxzoa rheumatica
tttgtcggcctctactgacataaaattatactcaggtggtaaatcacattattttacttataaatatttagttaacttcctttgtaggatgaaccccacttgctcatgatatatttattcttttatatttgattgagcacttttgcatttatgttgctgaagaataatttcttgtaatgtcatcgggttttggtatcattatataggctttctaagattaattggaaaaagttcctttctcctaaattttttgagaggcttttt

SEQ ID NO: 1689 - DNA, 195 bp, Protomyxzoa rheumatica
attgaacgaagtggtgtagaatggagtagaatggaatggaatggagtgtaatggaatgtaatggaatggaatggtatggaatggaattaaatagaatggagtgtacaggaatggaatgggttggagaggaatagaatggaatggaatggaatgaggaggagggaagtggggtggaaaggaatggaatggatagga

SEQ ID NO: 1690 - DNA, 170 bp, Protomyxzoa rheumatica
attacattccattccattccattccattccattccattccaccgcacttcactccactccacttaattccactccactccactcctccattcaattccattccattcctttccatccctttctattccatcacattccattccactggacgccacgccactccatttcac

SEQ ID NO: 1691 - DNA, 160 bp, Protomyxzoa rheumatica
tggaatggagttgaatggaatggaatggaatggaatataatgcaatagaatgtaatggaatcaacttgagaggtatggaatttaatggaatggaatggaatggaatgcaatggaagggaatggaatctactcgagtggaatggaatggaatggaatggaa

SEQ ID NO: 1692 - DNA, 157 bp, Protomyxzoa rheumatica
aattatataaatttgaaactgaattatttttttctgtgtgttataaggttgcaattaaaaactcaatatgtacaaacaaacaaaaaaataataaaaaaatcaatatgtaatttacatttgtaaaaaaatatactcaaattctacaatcataaatcta

SEQ ID NO: 1693 - DNA, 179 bp, Protomyxzoa rheumatica
tacacacagacacaccacaccacacatacatacacatatacatacacaccacacacatatatataaacgctacacacagacacaccacaccacacatacatacacatatatatacacagcacacacacatatatacacactacacacagacacaccacaccacacatacatacacatat

SEQ ID NO: 1694 - DNA, 135 bp, Protomyxzoa rheumatica
gaaccgcagcagctgtcctagccttacacgaagatcaagcggcaactcgcgaggtaatggttgagcgggaatcgcttaataatggtgttttccaagcgtcgcggatcttgatcgagttcgcaatctgtgagtgtc

SEQ ID NO: 1695 - DNA, 156 bp, Protomyxzoa rheumatica
tggagtggaattgagtggaatggagtgaaatggagtagagtgaaatggaatagaatggagtagagtgtagtagaatggagtggagtggaatggaatggagtggaatataatggactggagtggaatggaatggagtggagtggagtggaatggagt

SEQ ID NO: 1696 - DNA, 169 bp, Protomyxzoa rheumatica
agaaagaagaagaagcttggttacgttttggagtcaaataagaccggatgtcaggtctatgattgcgtataaaaattagaaccgcaatcggatcccgaatagtgtttccttgttagaagatataaccgcaatcgactcccatattagtctcaaaatggtcgcaaactag

SEQ ID NO: 1697 - DNA, 576 bp, Protomyxzoa rheumatica
ctccattccattcctctccattccactccattccattccattccactacattccattccaatccactttactcaactgcattccactccattccattccactccaccccacttcattccgttcctttccattccattgtactcgtttccattccattcctttgcattccattccaatccactccactccgctacattccactccaatcaattccactccactcctgtcttctgcattccattccattcaattcgtttcgattctattcctttccattccactccactaccctccattccactccactgcactccattctttccacaccattcccctccaccccaatccacaactttccattccactgcactccacacaactacattccactctattctattacattccattgaaatccactacattccattccattccatgacattctagtccatttcattcctctcaattcctttcaactccagtcctttccattccattcctttccattagattccattccattccacttcactcctttccattgcattctgctcccctgcactccaatccatt

SEQ ID NO: 1698 - DNA, 152 bp, Protomyxzoa rheumatica
acttgaatggaatagaatggaagaggcgcgaatggaatagaatggaatggactcgagtacaatggaatggattcaaaaggaatagaatggaatggacctcaatggaatggagagaatggagtggaatggaatagaatggaatggagaggaat

SEQ ID NO: 1699 - DNA, 139 bp, Protomyxzoa rheumatica
atggaatcgaatggaatggaattgattggaatgtggtgaaatgaagatgaggggggtggaatggagtggaatgggattgggtggaatggaattgaatggagtggaatggagaggaatggagtggaatggaatggaatgg

SEQ ID NO: 1700 - DNA, 144 bp, Protomyxzoa rheumatica
aaagcttaagctgaactttgtcagatcatctagccaacaaagaaaagtggcaactatctatccacgcaattacagaagcccaaataatcacttcaagatttgaatgaaagaaaaatgaccctgtaacctgattatattacaatt

SEQ ID NO: 1701 - DNA, 159 bp, Protomyxzoa rheumatica
attccattccgttccaatccatttcattccactccactccgttcaattccattccattccattccatttgggaagtttccattccattccgttccattccattccaatccactgaggttcactccattccattccattccattcctttccattccaatc

SEQ ID NO: 1702 - DNA, 197 bp, Protomyxzoa rheumatica
ccattccattccattccattccattcccctgcactccgatacacttcactcaattctaatccactccactccactcagttgcgttcccttccattccattccattcctttccactaaactccattccactcaactccattccctccactccactccgcaaaactccattccactccattccactccactctgttcca

SEQ ID NO: 1703 - DNA, 166 bp, Protomyxzoa rheumatica
atttcattcgcgtccattccattacacttaattccattccattccattccattcaattcctttcgtgtcaattccatttcattccattcgagtccattcaactgcattgcattccattccttttgagaccatgccattccattccattacattccattcgagtcca

SEQ ID NO: 1704 - DNA, 155 bp, Protomyxzoa rheumatica
ccgtcccgcacaataagtcggttgcaacccgcagaaggttcgacaaccaaaggcaaatttatcatcggagccgattgccacattgcttccgtgaggtcgagcacacagtgtgcgcacctacgccggggattgagctgagcacgatgcggccggat

SEQ ID NO: 1705 - DNA, 136 bp, Protomyxzoa rheumatica
atgtgtttactatagaatatctttattttgttcaatcagtatataacaattcccttttcgaaattgaagctaaggaggttttatgcgatgagggtgatacttacatgctcaccgaattcactcccactcgttattc

SEQ ID NO: 1706 - DNA, 138 bp, Protomyxzoa rheumatica
aatggaaaggaatggaatagaatggaatggaggggagtttagtggagtggagtggactgtaatggagtggaatggaatgggatgttatggaatggaatgtttagtggagtggagtcaactagaatggaatggaatgca

SEQ ID NO: 1707 - DNA, 336 bp, Protomyxzoa rheumatica
aaatggaatagaaccgaatggaatggattggaatggaacggaatggaatggaatcgaaaggaatagaatggaattgggtgtaatggaaagatatcgagtggaatggaatgcaatggaagggactcgaatggaatggactggaatggaatagaatggaatggaatgaaatggaaaggaatagaaagtaaaggaatcggatggaaagaaatggaatggaatggagtcgaatgcaatagaatcgattggaatggcatcaaatggaatggaaaggaatggacctgaatggaatggactcgaatagaatggaaacgaaaggaatggaaacaatagaatgga

SEQ ID NO: 1708 - DNA, 148 bp, Protomyxzoa rheumatica
tggcatgtgtgttgtgcatgatgtgtgtatggtgtgtgtgtttgtgtggtgtgtgtgttgtgcatgatgtatgtatggtgtgtgtgtggtgtgtgtgatgtgtgtgggactatggtatgtatggtgtgtgtgtgtggtgtgtggtatg

SEQ ID NO: 1709 - DNA, 191 bp, Protomyxzoa rheumatica
actacaatccagtaagttcaattccgttcccttccattcctttccgttccgttccattccccaccattccattcaactccactccattccactcgactccacttctctccatttcactcccttccattccaccccactcctctccactccactccatagtgttctattgcattccactccgttcaattcta

SEQ ID NO: 1710 - DNA, 141 bp, Protomyxzoa rheumatica
acttaagaatgagcccgcgccaaggcagtcgaaaccgaagaagctgccagcagtgaactcgcaactaaatccatccacaaacagcaagatcattgtcccaattatcatcgaaagcgaaatctgccgtcacgaaaaggtgag

SEQ ID NO: 1711 - DNA, 202 bp, Protomyxzoa rheumatica
gaatggaatggaatggaacggaatggaaaagaatggaatgtaacggaacagaagggagtggagtggagttgagtggagaagatgggagtgcagtggaatggaatgaaatggaatggaaaggaatagaatggagtggagtggaatggaatggattggagtggagtggactggaatggaatggaaaggaatggaatggaatgca

SEQ ID NO: 1712 - DNA, 143 bp, Protomyxzoa rheumatica
ccattccattcaattccatgccattcattccactccatgccattcccttccattccactccattccagtccattccactacacttcattccactgcactccactccattccactccaatccattccattacattccactccat

SEQ ID NO: 1713 - DNA, 179 bp, Protomyxzoa rheumatica
aatagagtgcactggagtacagtggagtggaatggaatggagaggagtggaatgtaatggaatgcagaggaatggaatgtaatggaattccctgtaatggaatggaattccatgtaatgttatgaattccatggaatgtaatggaattccatggaatggaatgctttggaatggagtgg

SEQ ID NO: 1714 - DNA, 127 bp, Protomyxzoa rheumatica
gaatggaatggaatggaatggaatgcaattgaatggaatgaaatcaattagagtggaatagaatggaatggaaagcatttgaattgaattgaccagaaaggattggaatggaatggaatggaatgga

SEQ ID NO: 1715 - DNA, 177 bp, Protomyxzoa rheumatica
ccattccattccattccattccactccattccaatccattccattctattccattccattctactccaatccattccattccactccattgcgctccactctgttcgaatcaattcctctccattctagtccactattttccattcccttcaaaacgagttcacaccgctccactcc

SEQ ID NO: 1716 - DNA, 132 bp, Protomyxzoa rheumatica
aatggaatggaatagaatggaatggaatggaatggaatgcggtgaagtgcagtgaagtggattggaatggaataaagcagaatggaatggaatggaagggaatcgcatggaactgcatggaaacaaatcgaa

SEQ ID NO: 1717 - DNA, 133 bp, Protomyxzoa rheumatica
ccttttcattcagttcagttataatccattcaagtccattccattccattccattgcttttgtgtccattccattccatttgagtccattccactctcttccttttgattctgttctactccattccattctc

SEQ ID NO: 1718 - DNA, 143 bp, Protomyxzoa rheumatica
aagtcgaatggattggaatgtaatggagtttagtggaatggaatggaatgaagtttagtttactggagtggagtggagaggaatggaatagaatgtaatggaatgtaagaaaatggaatggaatggaatggaatggaatggaa

SEQ ID NO: 1719 - DNA, 148 bp, Protomyxzoa rheumatica
atggaacatactcgaatggtatggagttaaatggaatataatcaaatggaatggaatcgaatagaatggaattgagtggaatcaaaaggaatagaatggaatggagggtaaaggaaagatatcgaatgaaatggaatggaatggaatg

SEQ ID NO: 1720 - DNA, 196 bp, Protomyxzoa rheumatica
tgaatggaatcgaatggaatcaaacggtatcaaatgcaatgcagtgaattggagtggagtgggatggagtggaatggaatggaattgaattgattggagtggaatggagtggaatggaatcgaatgaaatgtaatggagtggaattgagtgaaatgcattggaatggaatggaatcgaatggaatggaatgcactc

SEQ ID NO: 1721 - DNA, 124 bp, Protomyxzoa rheumatica
agtccattccattccattccaacctattccattccattccattccattcgagtccgttccatttgagtcaatcccattcgagtccatttcatttcagtccagtccattcaactacattctattc

SEQ ID NO: 1722 - DNA, 166 bp, Protomyxzoa rheumatica
ccactccattccactctattgtactctattccaatccattccactccactgtactctattccattgaattccactccactcaactccattccactcaacgccattccactccaatccattcaagtccactccattccattctgttccatttcactcttttccattc

SEQ ID NO: 1723 - DNA, 210 bp, Protomyxzoa rheumatica
gacacagtgatatcctgttgaaagtaaggaatggaatgcaatggagttaaatggaatagagtagagtggaggggagtggagtggtgtggactggagtgaaatggagtcgaatggaaagagttggagtgaaatggaatggagtggagtggactagaggtaaataaggtggaatggaattggatggaatggaatgcaatggaatggtgaaaa

SEQ ID NO: 1724 - DNA, 126 bp, Protomyxzoa rheumatica
attccatggaatggaattccatggcatcgaaaggtaatccatggaatggaattccatggaatggaaaggaaatccatggaattccatggaatcgaaaggaaatccatggaatggaaaggaaatcca

SEQ ID NO: 1725 - DNA, 138 bp, Protomyxzoa rheumatica
attccattcaactccattccattccattccatactattcctttcccacccattcttctccactccattccattccataacactctagtctactccattccattcaattgccttcgtttccattctattccactccatt

SEQ ID NO: 1726 - DNA, 145 bp, Protomyxzoa rheumatica
ctggccagaatgagctttccttgttccactggagtctcccccatccccagagagttcaggtgtttaagtcacagaccctgtcgtgtgtcaaaggggaccctattgcagtccaggacctccctcgtggggagctgctgtgaaaatg

SEQ ID NO: 1727 - DNA, 141 bp, Protomyxzoa rheumatica
agtggaatggaatggaatggaatggaatagaatagaatgggatcaggccgattcgaatggaatggaatggaatggaatggggtgaaatggaatggaatcaacccgtttccaattgaatggaatggaatggaatggaatgga

SEQ ID NO: 1728 - DNA, 255 bp, Protomyxzoa rheumatica
tcgagtccattctattccattccattccattcattatcacccctttccaatccattccattccattccaaactattgcattacattccatttgattccattccattcaagtccattccattcgtgtccattacacccgaatccattccattccattctgttccactgcattccattccattccattcgtttgcattccattctaacccactccactccacaacactccgttctataccattccttcccattgcat

SEQ ID NO: 1729 - DNA, 206 bp, Protomyxzoa rheumatica
ggaatggaatgcacgccattggaatgtatttaaatggaaaggaatcgaatggaatgggatcgaatttaatggaatcaaactgaatagaatcgaatggaatgggatccaaagcaatggaatcgaatggaatggaatccaatggcatcgaatgaaatcgaatggaatgcggagaactgaagtggagtaaagtggaatgtagtggaatg

SEQ ID NO: 1730 - DNA, 149 bp, Protomyxzoa rheumatica
cataagactattatatagaggtagagcgggggaagaaataaaaacaggagtctttccaagcgcttgcctctgggtggtttcccaagtatgatttcataattctgtgtcctcagacactctctgaatgccactcactctctggggctcag

SEQ ID NO: 1731 - DNA, 128 bp, Protomyxzoa rheumatica
gtggtgtgtgtagtgtgtagtgtttggtgtatatgttgtatgtggtgtgtatgtggtgtgtatagtttttggtgtgtgtgtggtgtgtgcatggtgtttggtgtgtatgttgtgtgtgtggtgtgtgt

SEQ ID NO: 1732 - DNA, 125 bp, Protomyxzoa rheumatica
ctcattcttaagtcttttcgaattcttcttgatgtcgacaagctgcttcaagacaccattgactgcagcaagtgaaacttgcactgcggccaagccagcaagccccatctgccaattctctatcc

SEQ ID NO: 1733 - DNA, 176 bp, Protomyxzoa rheumatica
tggagtggattgtaatggaatggaatggaatgtaaaggaatcgaatcaaattgaatagaatggaatcaaatggaatcaaatggaattgaatggaattgaatggaatcgaacatacaaaatggaatcgaatggaatcaaatggaattcaattgaaaggaatccaatggcatcaaatg

SEQ ID NO: 1734 - DNA, 138 bp, Protomyxzoa rheumatica
agataaaaatgtttaatttattaggaaaatgtagtaattttaaaattatatgaagctaatgatgaaacagcaaaatgtataaaacaaatatcaacagaactacaaggagaaattgacacatttatcacagtaaatttt

SEQ ID NO: 1735 - DNA, 140 bp, Protomyxzoa rheumatica
gcggctccatcattgacgaggtatcttctatttttgcggctttgtgcctcatctctgcaagcctgctcatcgactttcttctcgaccaacaagaaatcgattttctcgaacgagtgaaattcctgaatggcggctaccta

SEQ ID NO: 1736 - DNA, 184 bp, Protomyxzoa rheumatica
ttacttaagaagtctttccaaccctaaggggagaaaaacaggactagagttctatttatttgttctttcttctatccatttgatgactgctagttttcatatgatacagttggagacactttctgccttttgtcttattgatgattacaacaattgatttactactactagtagtactaatttt

SEQ ID NO: 1737 - DNA, 441 bp, Protomyxzoa rheumatica
aatggaatggagtggagtggaatgtaatggactggaataaaatggagagaaatggagtggagcagaatggaatggaatggagtgaaatggcatggagtggaatagagtggagttgaatggaattgaatggaattgagtggagttgagaggagtggagtggagtggaatggactgcactggaatgaaatggaatggaattcagttgaatggaatagaatggaatggaatggagaggaatggaagggagagtaatgaagtggattggagaggagtggaatggaatggagtggaatggattggagtgcaatgtagtggaatagaatagggtggaaaagagtggattggaatggaatggtgtggattcgagtggtatgggtggaatggaatgaaatggaatgtagtggagtggattggagtggagtggaatggaatggaatggag

SEQ ID NO: 1738 - DNA, 125 bp, Protomyxzoa rheumatica
ttgaatgaaatagaaaggaatagaaaggaaatgaatggactcgaatggaatggaaaggacacgagtgtaacggaatggaatggaatggactggaattatggaatggaatggaatggaatggaatg

SEQ ID NO: 1739 - DNA, 207 bp, Protomyxzoa rheumatica
atcttttcatttcatttcatcatttcacttcatcatttcatcatttgatttcctcatttcctcatttcatttcatcatttcatttcatttcatcctttaatcatttcatctcatcatttcatcctttcttttcatcatttcatctcatcaatgcgttttatcatttccttatttcatttcatttcatcatttcacatcatctcatca

SEQ ID NO: 1740 - DNA, 239 bp, Protomyxzoa rheumatica
aaaagacctcaggacttcactgaatttattctcttgtaatctgagaaattcttattattcagttctaaacgtgagaactgtcttagcacttaggttaactagtcatctaagaaaaaaaagtaaaaactattttaaacatttcaaaacagatattttcaagacttaatatataagcatgattatatctgcgctgaaatttttgactcttagaaacacatttggaggtttgtatattattt

SEQ ID NO: 1741 - DNA, 146 bp, Protomyxzoa rheumatica
tgttattaacatccttcttacctgtttttttcctcttattaaaaccagagtagtattaagctgacaataactatttgtagatatttgtagaccttataatttaataaaaatgtttcatcacataaaataaataaataaataaataa

SEQ ID NO: 1742 - DNA, 132 bp, Protomyxzoa rheumatica
gaatggaatggagtggagtggaaaggaatgctattgattggagtggagtggagtggataggaatggacgggaaagaaacagagtggaatggaatgcaataaagtggaaaggagtggagtggagtagagtgaa

SEQ ID NO: 1743 - DNA, 220 bp, Protomyxzoa rheumatica
ttgcattccattccatttctttccattccattccattccatttcttcccattccattccattccattccaatctttgcattccactcctttccattccgttcatctacattccattcctatccattccactccactgcattccaatccattccattccactccactcccttcctctccaattcattccattccattccattccattccattccattccat

SEQ ID NO: 1744 - DNA, 167 bp, Protomyxzoa rheumatica
actccactccattccgttccactccattctgttccactcctctccactccattctattccattactttccattccattacattccactgcactgctttccattccaactcactccactctgctaaactccactcctctcaattccattccattctattccttcacat

SEQ ID NO: 1745 - DNA, 235 bp, Protomyxzoa rheumatica
gaatggagtggagtgaagtagagtggactggagtgcagtgattggagtgcagtagaatggagtgcaatggaatggaatggaatggagtggagagaaatggaatggaaaggaaaggagtggagtggagtggagtggtgtggagtggaaatgagtggaatggagtgaattggagtggagtggaatgaagtggggtggaatggaatagaacggtatggaacggaaaggaagggagttg

SEQ ID NO: 1746 - DNA, 188 bp, Protomyxzoa rheumatica
gaagggaatggactcaaatggaaagtgctggaattgaatggacaagaatggaatggattggagtgcaatggatgcgaatgaaaatgaaacgaatggaatggaatggaattgaaaggaatggaatagaaaggaaaagaatggaatgcaatccgaaggaacttaagaaatggaatgatgttgaatggaat

SEQ ID NO: 1747 - DNA, 124 bp, Protomyxzoa rheumatica
agtggagttgagtggagtggataagagggcattggaatgaaatgaaatcaatggattggagacgagtgcagtggactggaatggaatggaatggaatagaacggattggaagggaatggaatgg

SEQ ID NO: 1748 - DNA, 139 bp, Protomyxzoa rheumatica
aggaatggagaggaatggaatggagggtagttgaatgcaatggactggaatggaatgtactggagtggaatggaatggagtggagtggaaaggagtggaatggagtgaaatgaagtggagaggaatggagtggagtgaa

SEQ ID NO: 1749 - DNA, 142 bp, Protomyxzoa rheumatica
aggctttaaaggatgtcctgtgtatggtggagtccatgaaacgtcctttaatattacttttccttttgcattaattatgatgacttgatcccaagcatttcaaggagataagtaaaatctaaaactttgtaaggcgaaatta

SEQ ID NO: 1750 - DNA, 222 bp, Protomyxzoa rheumatica
actaggagatacgctatcagattccgctagatttgcatagccgacggtttcgtcgaataccctcagaaacagtttcgcagcgtcctgagtaaagccacgatcaaggtgcaattcgctcacgcaatgcgagtcggatggacgatccggaacccagctttgagcgtattcggcaatcaatcgcggcttgagcgccgcctccctgatagcttgctctttggcacc

SEQ ID NO: 1751 - DNA, 123 bp, Protomyxzoa rheumatica
tgtatatatgtgtgttaggggtgtgtaagttaggtgggtgtatgtgtgtatgtatctatatgtgtgttaggagtgtgtgtgagtcaggtgggtgtatgtgtgaatgtgtgtatatgtgtgtta

SEQ ID NO: 1752 - DNA, 125 bp, Protomyxzoa rheumatica
gacttgaatggaatggaattgaatggcatggaattaaatggaatggaatggactggaatgcaggggaatgggcttgaatgtaatggactggaacagaacgaacttgaatgaaatggacccaaatg

SEQ ID NO: 1753 - DNA, 129 bp, Protomyxzoa rheumatica
attcaagtccatttcattccattccattccattgcattccagttcattccattctgttatattgcattctattcttctccattcaattccattgcattcaattgatgtccattccactctattctgttc

SEQ ID NO: 1754 - DNA, 150 bp, Protomyxzoa rheumatica
tagtaagtatattttaaactatctacttaatcttgaaaaagttttctactttgtgtgtggggagaagattaggaggataaaccctttttttttgtatagtcccaactaattaatcagagtagatacagagaagactaacaaaagcccagt

SEQ ID NO: 1755 - DNA, 502 bp, Protomyxzoa rheumatica
ctccattccatcacattgcattccactccattccactctatttcatttccctcaattccattccgttcaactccattccatttgtcaccatgccacagcactccactccattccactcaactccattgaattccattcctttcaactgcactccattccactccactcaactccactccattccactccattccagtccactccattccattctactccattccactgcactcaactacattccactccattccacttcactccactccactcaactccactcacctccattgaactccactccactccacttcactccactccactccactgcaatccatctactccattcctttccactctgttgcattccactcctctgcattccattccactccattcaattccattccattccactctattctattcaattccattccactccattccagtacattccattccactccattccattccactccattccactccactc

SEQ ID NO: 1756 - DNA, 123 bp, Protomyxzoa rheumatica
tgttttgtgttgtgcacatatgttgtgtttttgtgttgtgttatgtgtatgggttacatgtgtgttgtgtatatattgagttgtgtgtatgtgttatgctgtgtgttgtgtatgtgttgcgtt

SEQ ID NO: 1757 - DNA, 303 bp, Protomyxzoa rheumatica
gaatggaatagaatggaatggaaaggaacggaatggaacggagtggagtggagtgtagttgagaggagtggatcggagtgcagtgaactggaatagaatggaagggaatggagtggagtggaatggaattaaatggaatgaagtggattggagaggagtggagtttagtggagtgcagaggaatggaatggagtggagtggaaaggaagggagtggagtggagtggatcagaggcgagtggagtggagtgaaatggaataaaatggagtggagtggagtggaatggaatggaatggaatggtg

SEQ ID NO: 1758 - DNA, 215 bp, Protomyxzoa rheumatica
gaatggaatggaatctaccagagtggaatggaaaggaatggagtggaatggaatggaattgaagggaatggaatcaactcgagtgtaattgaatggaattgaaaggaatggaatgttgtggaatggaatggaatggaatggtagggaatggaataaaaactagtgaaaaggaatggaatggaaaggcatggaatggaatgcaatggaatcaaccc

SEQ ID NO: 1759 - DNA, 307 bp, Protomyxzoa rheumatica
aatcaattccattccattccactccactccatctgtctccactgcattccattccactccacgccactccactccattgcactacagtccactccactccactctactgaaatcgactccattccgttccactccactccactccactgcaagcaattccactcctctccattccattccaatctaatccataccattccaaatctatttcattacatgccattcgacttcattccattccactgcactccattccatttcacttagttccattccattccattccactccgttgcattccattcca

SEQ ID NO: 1760 - DNA, 146 bp, Protomyxzoa rheumatica
tgcattccattccattcgtttccattccactcccgtccattccattcgagtccattccatttcattctgttccattcgatatccttctattacactccaacccattccattacattatattacattcaactcctttccatttgagt

SEQ ID NO: 1761 - DNA, 135 bp, Protomyxzoa rheumatica
caacggagtgtaatggaatggaatggagtgatgtggagtggagtagggtgtacttgagagtaatggtttcatgtggtatggaatggtatggaatggaggggaaacgaatggagtggagaggaatggaaaggagtg

SEQ ID NO: 1762 - DNA, 249 bp, Protomyxzoa rheumatica
ttccattcgattgcattccatttgattgcattccattccagtccattccaatggagtccattccattcgagaccatttcattcgattccattccattccagtccattctaatatagtccattccattcgagtccatttcattcgagtccattccattgcagtccattacgttcaatttcattccattcaattccattgtattcaactccattccattccatttgacaccattccattcgagtccattcc

SEQ ID NO: 1763 - DNA, 317 bp, Protomyxzoa rheumatica
tccactccactccattccattccactcaactcccctcaattccactgccctacactgatttcctccactccactccttttcattccgttccacttcatttcactccactccactctattccagttcactccattcctatccactctgctcctctccactccactccattgcactccattcaattccattccactccacaccctcaattcaactccactccattccactccactccattcaactccactcctttccattccatttcattacactcagttccatttcactccactccattccattccactccactccac

SEQ ID NO: 1764 - DNA, 126 bp, Protomyxzoa rheumatica
aatggaatggaatggaatggattggaatcaccttgagtcgaatgcaatggaatggaaaagaaaggaatggaaaggaatggagtggaatcaaccctagtggaatggaatggaaggcaatggaatgga

SEQ ID NO: 1765 - DNA, 172 bp, Protomyxzoa rheumatica
caaacccattcctttcgagtacactccattccattccattcaattccattctattccaaactgttcttttccattttgttccagtccattccattcgaatacattccattctgtccattccattcgattcctttccacttgattccactccgttccattccattgcattcca

SEQ ID NO: 1766 - DNA, 187 bp, Protomyxzoa rheumatica
gagattttaaaagggttttaaaatatttacaaatgattttaaaagggttttaaaatatttacaacagattttaaaagattttataaagatttacataaatttttaaaggttcttcttgtaaattctctaaaaatcttataaaaactcttatacatcttttaaagctctataaaaatctcttctaaat

SEQ ID NO: 1767 - DNA, 138 bp, Protomyxzoa rheumatica
actccattccattccaatcaattccagtagattccattacactagaatgcattccattccattccactctactaccttcaactccattgcattccactaaattcctatgcattccactccattcctttccactccact

SEQ ID NO: 1768 - DNA, 463 bp, Protomyxzoa rheumatica
aaacgttacttaattagtttattagttcaaaaagttatttggtgtaatgaggagcacaatgaactgtggttacacattaaatgatagcttctgttagtatatcacagtgccccaaaatgtgatctgctgtatttctgctgttataaattcagtcgcattttttagtcctagtattttttcttctgaaatatttttgtctgtcatttgctgataatgtgtatcctctgcttactgttcaattgtgctacccatttatcttcaagcctagttagtccaactttctaataaaatttttaacaatggtatgttcatttattgtaacctaaatagtaaatttgcatgatagttttacagttaccaaataggatttaaaatacgtcaatttgtcgctactaatgaatctctgggttcctaattttaaattcttatgtatcatgtctattaaatatgtatgtgcaatggc

SEQ ID NO: 1769 - DNA, 126 bp, Protomyxzoa rheumatica
ttttcaaattactacaatggacatagaatacatccatcacacccataagttctcttgttcccctttgtggtcaatttctcccgccacccacaacccctttgcaaccccaaatctgttacctatctt

SEQ ID NO: 1770 - DNA, 123 bp, Protomyxzoa rheumatica
cgagtctgccgttggggatcattagtaatctgtaggagcgaagctacgggacaaaatgatgaccaaacgcagcgtgtaactaccttcatgcggctatgatccacgttagcttgtggggcagac

SEQ ID NO: 1771 - DNA, 147 bp, Protomyxzoa rheumatica
acccgggcgaatgatctcgttcattcggcgtcccccttaaggaattccagatagtactcttcttcaggcgccatcccatagtcaggctttttcttctcgcgcacatacttcacgcggggcatcttggattttccgtagaagttcccg

SEQ ID NO: 1772 - DNA, 130 bp, Protomyxzoa rheumatica
cctggggagggggcaattgagtgagggactgcgaatgccagaaaacatgggtgagaagcatgtccgcacctcccacccaacctggtgggaatcctgtaaagcctgcctgaactcttgttcatatcgttgc

SEQ ID NO: 1773 - DNA, 123 bp, Protomyxzoa rheumatica
ggtgtgcgacattggcaaatgcaccaccacccggtgctcgtcctggcgcatgctggggccgaacaaggtgatgcaatgtgcgccggccagaatggagagatgcgtcagcatcgcccctttggg

SEQ ID NO: 1774 - DNA, 314 bp, Protomyxzoa rheumatica
ccactccattccattccattacactccatttcattcaatccattccactccacttcaatccattccactccactccattcctatccactctactccactccactccattctgttccaacccattccactccattccattacactctattccactaaaatccattctactccacaccattacattccattccatttcactccacaccactccactccactcaactacattcccttccactcaattccactgcattctattccacgcaacttcactcctcttcactccacaacacccttttcctgtctattccatt

SEQ ID NO: 1775 - DNA, 178 bp, Protomyxzoa rheumatica
ctccattccattccatcccattccattcaactcccttcctctccagtccactccaaaccactccactctattccattccatcctttcaattccactcaattccactccacttcattccactaccctccgctcaattcaattccactcgaaaccattccattccacaccactccactcc

SEQ ID NO: 1776 - DNA, 183 bp, Protomyxzoa rheumatica
gcaaagaatggaatggaatggaatggaatgaaatagaatgtaattgaaacaaccggagggaatggactggaatggaatgcaatggaatggaatggaatgcagtgtaatagaatagaattgaataaacacgagtgttatggaatgcaatggaatggaaaggaatggagtggaatggaatggaat

SEQ ID NO: 1777 - DNA, 227 bp, Protomyxzoa rheumatica
atggaatagaatggaacagaatggaatggactcaaatggaaaggaatggcatggactcaaatggaatggaatgaaatggactcaaatgcaatagaatggaatggaatggaatggaatggagtgtaatggaataaaatggaatgcaatggaatggacttgagtggaagagaatggaaaggaatggaatggactcaaatgacatggaatagaatggaatcaaatggaat

SEQ ID NO: 1778 - DNA, 170 bp, Protomyxzoa rheumatica
agatggaacagaaaggaatggaaaggagtaaaatggaatacaaaggaatggaatgtcatcaaatggaattgacaggaatggaatgcagtggattggaatcgaatggaatggactcgaatggaatggagtcgaatggaatgaacgtgaatgtaatggtatggaatggaatt

SEQ ID NO: 1779 - DNA, 173 bp, Protomyxzoa rheumatica
tccattcctctcgattccactccattccattcccttgtatttcattctattccattccattgcattccattccatttaatttggtttcattccatttgattccattccattcgaatgaattacattgcaatgcattacattcaagtactttctatccagtcaattccattcag

SEQ ID NO: 1780 - DNA, 204 bp, Protomyxzoa rheumatica
ccgtcatcgtcgcttgcggcagaactagatgatgtggcggctgatgctcagcgtttagtagaccttctgagagccgataacgcgctttccgacgattttccgagaattcaggttgaggaaatctgccattctgtcggtaaactcaagttcggaacggctcatacagcgtatcaagtactatattatgtatcgaggcgattagcg

SEQ ID NO: 1781 - DNA, 136 bp, Protomyxzoa rheumatica
tccattccattccattccattccactcgagtttattccattccattcctttccactcgagtttattaaattccattctattgcgttccattacatttcattcctttgcattcctttccattccattccattgcatt

SEQ ID NO: 1782 - DNA, 183 bp, Protomyxzoa rheumatica
aggaatggattggagtggagtggaatgcaatgtaatggaaaagaatggaatggaatggaagggaacagagtgcagtggagtggagtgcagtggagttgactgaagtggatgggagtgcagtggaatggataggaatgcaatggaatggaaaaaggttgagtggaatggaatggaatgaaatgg

SEQ ID NO: 1783 - DNA, 154 bp, Protomyxzoa rheumatica
tactgaactggaataaaatcgaatggaatggaatagaatggaatagaatcaatcgaatgatcatgaatggaatggacgagaatgcaactttctcgaatggaatggcattgaatggaatggaatcgaatgtaatgggatggaatggaatggaatg

SEQ ID NO: 1784 - DNA, 148 bp, Protomyxzoa rheumatica
tcagtggctggtgatggaaaaactgggaagcaagaccgcgaacgaagtcgactggagcgcgccgcgtttgatctgtatcgccggcgacttcacgcgctacgatcagcacgccgtcaaacagatcgcgcgaaacatcgagctgatccgc

SEQ ID NO: 1785 - DNA, 244 bp, Protomyxzoa rheumatica
atggaatgcaatggaatggaatggaatggaatggaatcaaatgtagtggaattgaatggaatggactcgaacagaatggactcgaatggaatgaaatcgaacggagtggagtcaaatggaatggaaacgaaaggcatcgaatggaatcgaatggaatgtggtaaagaggagtgcagtggaatgaagtggaatgcaatggggtgtaatggaatagaatggagtggagtggagtggaatggagtgg

SEQ ID NO: 1786 - DNA, 182 bp, Protomyxzoa rheumatica
gaaacccaatggctgtattccataagcctgcaggactcttgctcttctccttatttaactacaccagcttaggagtagcctacatgctccatcttcatttccttaccccatctactccacagtctaccattctcttgctgaggttacttacctggcctctttcctctacactcttttccaca

SEQ ID NO: 1787 - DNA, 145 bp, Protomyxzoa rheumatica
aaatcacaaggaattgaatggaacgaagtgcagtgcagtgcagttgagtggtgtggagtggagtgcattggaatggaatggagtggagtggagagaagtggagtgtagtggaatggagtggaatcagtgctgtggaatggagtgg

SEQ ID NO: 1788 - DNA, 169 bp, Protomyxzoa rheumatica
gtggagtggagaggagtggaacggaataaggtgaaatggaatgcaatggagtggagtggaggggaaaggaatggcgtggagtggaatgggatgggatggaatggaatggactggagtggaatgcaatggagttgactggaatgaaatggagtggagtggaatggagtgg

SEQ ID NO: 1789 - DNA, 138 bp, Protomyxzoa rheumatica
attgagtggcctccaaaggaatgtagtggaatggtatcaaatggaatggaatagaattgaatgaattcgaaaggaattgaatgtaacggaatggaatggacatgaaaggaatggaagttaatggaatgaaatttactc

SEQ ID NO: 1790 - DNA, 135 bp, Protomyxzoa rheumatica
gaattgcatggaatggaatagtatggaatgcaatcgcatggcattgataggaatagaatgcaatgtggtgaactggattggagtggaatgcagtggaatggaatagggtgcaatgaaattgaatggagtggagtg

SEQ ID NO: 1791 - DNA, 144 bp, Protomyxzoa rheumatica
tttccactgcactccgatccactccactcaactccactccactccattcgattccattccgttctggtcagttccattctgttccattccactccatttcattccgctccactccactccactccatttcactccattagactc

SEQ ID NO: 1792 - DNA, 372 bp, Protomyxzoa rheumatica
actccactccaatccattccattccgctctactgcatttcactccattttattccactccactccactccattccattccactccataccttcccactccattccattctattccaatccattcctttccatttgattctaatccattccactccactgcactccactccatacaattccactccattccattccacttctttccaatccactccactccacactgttccattttgttccactccactccattccactccattctattcccctccactccactccgttccattccactgtactccactccaatccattccattcctctccactccactcagttccattccactctattcccttccactgcat

SEQ ID NO: 1793 - DNA, 197 bp, Protomyxzoa rheumatica
cttaagaatattataacgagtgatatccgcgaaggggtctccctcgaatataagagttccaatatcattggctccaagcacgcggcttccacgataagcaaagcggtatcagccttagcaaattcggctggaggctattttattacagggatccaatctgaggctgagaggccggtcggcttagatggcggtttctt

SEQ ID NO: 1794 - DNA, 134 bp, Protomyxzoa rheumatica
tccactccattccactccaatccactccactttattcaattccattccaccccattccattacaatccactccactctactccactcaactttaacgcattacattcaattgcattcgatgccattcaatacca

SEQ ID NO: 1795 - DNA, 124 bp, Protomyxzoa rheumatica
tggaatggaatggcatggaatggaatggactccagtggaatggagtagaatggaatgcaatcaaatggaatggaatcaaacagaatggacagaaattgaatggactcgaatggattggacagga

SEQ ID NO: 1796 - DNA, 140 bp, Protomyxzoa rheumatica
attccactcgagttgattccactccattctattgcattccattccattccattccattccggttaattactttccattctattgcattcgaggccacgtcttccaattccattccattgcactgtattgcattccattcc

SEQ ID NO: 1797 - DNA, 177 bp, Protomyxzoa rheumatica
tggaataccatgtggagtactgtgaataatatattattgaatactgtatggaatattgtgtggaatacagtgtggaatactgtgtggaatattgtgtggaattctgcatggaatattgtgtggaataccgtgtggaatattgtgtgggatactgtgtggaataacgtgtggaatatt

SEQ ID NO: 1798 - DNA, 171 bp, Protomyxzoa rheumatica
tgacaattttaatctcttaatactatttaaaaataattattaccatttatttaattatttaataagggtaaaataggtaaacagttctaaaaattacattggaaatataaaaaattatttttgtgggacaaatttttttcctaaaaaatttatttttgtgggacggaagta

SEQ ID NO: 1799 - DNA, 122 bp, Protomyxzoa rheumatica
atggaaaggaagggaatggaatgtactggaatggaatggagtggagaggaatggaattgaatggaatggactggggcggaggggagtggggtggaatggaatggaatggagtggaatggaat

SEQ ID NO: 1800 - DNA, 150 bp, Protomyxzoa rheumatica
tgcattccattccattcgagtctattccattatattccattcaattccattccactcgatggcactccattacactccactccactccactcaattccattccatttcattccattcctttccattccactccactctattccattccac

SEQ ID NO: 1801 - DNA, 197 bp, Protomyxzoa rheumatica
atggaatggaatggagtggagtggagtggaatggaatggagtcgagtttaatgcaatgtagtggagtggaacagaatggagtgttctgtaatggaaggaagtggaatggagtggagtgaagagaagtgaaatggaatggactggaggggaacatacggagtggaatggaatgaaatgccctgaagtggagtggaatg

SEQ ID NO: 1802 - DNA, 141 bp, Protomyxzoa rheumatica
tggagtggattggattggagtggagtgtaatggaaagcaatgtaatgcactggagtacagaggaatggaatggaaaacaatcgagtggattgaaatggaatgaagtggacgggaatggaatggagtggagtgtactggaat

SEQ ID NO: 1803 - DNA, 147 bp, Protomyxzoa rheumatica
cattccattccattccacttcattccgatgcactccagtcaaatccactccactccactacgttccgttctgttgaattccattctgttccattccataccttttcgttccgttcaattccattccttttcattccattcatttcca

SEQ ID NO: 1804 - DNA, 197 bp, Protomyxzoa rheumatica
attccagtccatgccattcctctcctttcaattccattacttcccattccattccattccactccattccactcatctccactccatttcaccgcattccatttgaatccattcgatgccattcgattccattccattcaattccatttgattaaactacattccatttcactccattccattccactccattccac

SEQ ID NO: 1805 - DNA, 314 bp, Protomyxzoa rheumatica
ggaattgagtggagtgcaatggagtggagtggtgtggagtggagtgtagtggaatggagtggattgttgtggaatggaatggtattttgaatggcatggagtggaatggaatggagtggagtcgagtacagtggagtggtgtggagtggaatggaatggaatggaatggaatgaactcaaatggaatggacttgaatggaatggaattgaatggaatggaatctagcggaattcggtaaagtggagtggagtttaatggaatgcaatggaatggaatggaaaggagtgaagaggagtggagcggagaggagtgg

SEQ ID NO: 1806 - DNA, 122 bp, Protomyxzoa rheumatica
caaacaaaacaaaatatcaacacaaaaaatctttctctatacactataaattagccacgtgaaaatgaaatttggacaattttatttctaaaaaaataacaggccagaatttctccaactgc

SEQ ID NO: 1807 - DNA, 124 bp, Protomyxzoa rheumatica
ttttctccttcttctcgcctccttcttcttttgccttcctcctgtcctccttttcctctgctcctcctctcctcctttttctcttccttcctctcctctcctactcctcctcatttttttcttt

SEQ ID NO: 1808 - DNA, 140 bp, Protomyxzoa rheumatica
tggaattgaatggaatcgaatggaaaaaatgggattgaatgggattgaatggaatcgaatcgaatggaatccagtggcatcgaattgaatggaatggagtgtggtgaagtggagcagattggagtgtaatggagtggaat

SEQ ID NO: 1809 - DNA, 179 bp, Protomyxzoa rheumatica
ggatctgagtgccgtggaatggaatggaatggaatggaatgctgtggagaggaattgaatagaaaggagtggagttgagttgggtggtgtggagtggaatggatcgtaatggagtgaaatggagtggagtggaatggagaggagaggaatggaatggagtggaaaggaatggaaaggaa

SEQ ID NO: 1810 - DNA, 162 bp, Protomyxzoa rheumatica
cattccattccattccgttccgttccattccattccatccaattccattccattaaattcctttgcattctattgcattccattccgttcctttccattcgtttccattacatatgagtccattccactccaatccattccattcatgtccattccattcca

SEQ ID NO: 1811 - DNA, 163 bp, Protomyxzoa rheumatica
atggaatggaatggaatggaaaggactagaatggaatggaatctgatggaactgaatggaatggaatggaatggaattgagtggaatagaatcgtgtggaatggcgtcaaatggaatggaattgaatggactcgaatggaatggactctaatggaatagaatc

SEQ ID NO: 1812 - DNA, 178 bp, Protomyxzoa rheumatica
ggagtggaaaggaatggaatggaatggagtggaatggaaaggaatggaatggaatggaatgaaagggaagggaaccaaccagaatggaatggaaaggaaagcaatggaatgaaatggaatggaaccaaaccaaatggaatggaatggaatggaatgggatggaatgaaacggaaagga

SEQ ID NO: 1813 - DNA, 125 bp, Protomyxzoa rheumatica
gaacagaacagaatggaaaggaacagaatggaatggaacggaacggaacatagtggagtggagtggagtggagtggaacggagtgcagtggaatgaaattcaatggaatgcaatggaatggaatg

SEQ ID NO: 1814 - DNA, 144 bp, Protomyxzoa rheumatica
gtttggagtggaatagagtggaatggaagtaacggagatgaagggaatgtagtggacaggaataaaatagagtggaatggaatggagttgaatggagtggaatggaaaggaatggagtagagtggagtggagtggattggagtg

SEQ ID NO: 1815 - DNA, 123 bp, Protomyxzoa rheumatica
gattccaatctgtagaattccattttttccagtccattcccttcaattccattctattcgattccattcttctcgattccagtccgttccatttcattgcattccattctattccattcccat

SEQ ID NO: 1816 - DNA, 192 bp, Protomyxzoa rheumatica
tctactccattccactcaattccattccatttcattccattcaattccattccactccattccattccactacactgcacttcactccactaaactccattccaatgcatcccactccattccactacactctactccactcccttccattacatcccattgcattcaactccattgcactccactccactc

SEQ ID NO: 1817 - DNA, 146 bp, Protomyxzoa rheumatica
tggagtggagtgcggttgagtggaatagattggcatggaatagacagttatggatgtgggtggaatggaattgaaaggatttgaggggaaagtaatggaattcaaaggaatggaatagaatggaattcaatgaaaaggaatagaat

SEQ ID NO: 1818 - DNA, 172 bp, Protomyxzoa rheumatica
ctccactccattgcattccaaaacactccactccattccactctattccacttctttccattccattatagcccacaaaattcctttagattccgccctattccattccagtccacaactttccactccattcccctccattccattgcactccacgccactccactctact

SEQ ID NO: 1819 - DNA, 340 bp, Protomyxzoa rheumatica
attccattccatttgatttcattccattcttctcctttccatttgagtccattccattccactccactctactccaacctatcccactccactcctttccattccactcctttccactccatttcactccattccattccgtttgtttccattcaattcctttccattccattccattgcattccatttcactccactccactccattcaataacattcctttccttttcattacgtccactccattccacactactacattaaattccgttcctccacattacattccacttcattccaatccactcatctacacttcaccgtattccatttgattcca

SEQ ID NO: 1820 - DNA, 158 bp, Protomyxzoa rheumatica
tcctttccattcgatatctgtccatgacagtccattcccttctaatcctttcgattccctgcaattccattccatttggttctattccatttgactccattccattcgagtacattcaattccactccaatccattccattccattccattccacttg

SEQ ID NO: 1821 - DNA, 191 bp, Protomyxzoa rheumatica
tggagtggagtggagtggaatggaatggaatggaaaggaatggagtagaatggagtggactggaatggaatggagtggagaggtggggagtggagtttaatggagtggagtgtcatggagcggagtggaaaggaatggagtggagtggaatggaatggcatggaacggagtgaaatggaatggagtgcagt

SEQ ID NO: 1822 - DNA, 136 bp, Protomyxzoa rheumatica
ccattccattccaatctattccagtcctttcctttccattccattacattactttctaatacacaatactccactacatttcactccattcaattcgactccactcccctccccaccattgcattccattccattt

SEQ ID NO: 1823 - DNA, 169 bp, Protomyxzoa rheumatica
atggaatgtaaataaatggtatggaatggaatggaatgtaatggaaaggagaagaatggaatggaatcggatggaaagaaatggtatggaatggagtcgaaagaaatagaagcgaatggaatggcatcgattggaatggaatggaatggaatggactcgaatggaatgg

SEQ ID NO: 1824 - DNA, 125 bp, Protomyxzoa rheumatica
ttccattccattccattccattccattcccctccattccactcaactgcactccactacattccattcctttctattccattacattccattgccctcctgtcgactccattccattccattcct

SEQ ID NO: 1825 - DNA, 159 bp, Protomyxzoa rheumatica
gaatggagtggagtggagtggagtggaatggagtggaatgcagtggagtggcatggaatggaattaattggaacagaatggaatgcaatggaatggaatggaagggaacagagtggagtggagtggagttgagtgcagtggatctgagtgcagaggaat

SEQ ID NO: 1826 - DNA, 265 bp, Protomyxzoa rheumatica
cattccagttgagtccattccattgcattccattccattccatttgagaccatgccattccattctcttccattcaattcgagtccattcaattccattccattacatttgattccattccattccattccattccactcgagtccattccattccattccattccattcctttcgagtcaattcaattctactgcataccatttgggtccattccattccattccattccatcacatttaattcgagttcattccattgcattc

SEQ ID NO: 1827 - DNA, 128 bp, Protomyxzoa rheumatica
cgagtataatacaatggaatggaatggaatggaatggactcgaacagaatggaagttattggaatggactcgcatagaaaggtatggaattgtcaagaattgagaggaacggaatggaattcaatgga

SEQ ID NO: 1828 - DNA, 171 bp, Protomyxzoa rheumatica
tcagaacacatcagtcaaagaaagagagaagaaaggaaggcaggaaggaaggaggaagaaaagaaggaaggaaagaacgggacaaagaaggaaagagagaaggaaggaaagaatgagagaaggaaggatggagggagagaaagatggagagagagagaaagagagaaggaa

SEQ ID NO: 1829 - DNA, 215 bp, Protomyxzoa rheumatica
actccactccactccactccactccattccattctacaacattccattgcattccactccactccattccactccgttccattccattccattcctttcatttactatccagtcgacctcaatccactccactccactatattctattccattccattccattctactccactcgactcaattccattcccctccaccccactccattgcattcc

SEQ ID NO: 1830 - DNA, 154 bp, Protomyxzoa rheumatica
taacaagtgtgataattgggctatattggcactgagcaaaagcatcgcccgcacgtttcaacgtatcaacacggacaatggggttgagcgtcggatagaacgctaagacacacttccagtattctggattatggccgtacgcccaaagtccttc

SEQ ID NO: 1831 - DNA, 133 bp, Protomyxzoa rheumatica
ttcaccaagaaggcatcttgagtctttggggctcagctggctcattctccagttggaaagccaagactcagagaggggaagtaactggcccaaggtcacaaagtgagaaccagaaccaaggcctcaggatgtc

SEQ ID NO: 1832 - DNA, 165 bp, Protomyxzoa rheumatica
ggaatggaattgaatggaatggaatggaatggcatagagtgcaacggaatggaatggcatggaattgaatggaatggattagaatgcgttggaatggagtagaatggaatcaaatgggatgaaagggaatggaatggaatggaattaaatagattacaatgcaat

SEQ ID NO: 1833 - DNA, 180 bp, Protomyxzoa rheumatica
atctgtggtttattttcctacaaatcagtatgtgtttcctgttgcataagtgaaaattgtcctatttatcatttccttattgcatcctatatttgcataaaatattgaaattactcccactttatttaacttagtataccagaacccttttcaatccattgaattaaactcaatgttatt

SEQ ID NO: 1834 - DNA, 236 bp, Protomyxzoa rheumatica
tacaaagaagacaatattacaagtataataagtttaataatagcacttgatttataatttacattgatttctcaatataatttacagtacatagtttgttcttatatcatctcgtttatatttgaaaacatgacaaattattaatatcttaaggaaagtattactgcatttttaatttaaaaactaggtgacatgcgcactgagtggaagtgccacagaaaaaatacataaatgct

SEQ ID NO: 1835 - DNA, 171 bp, Protomyxzoa rheumatica
cacatactgcacacataccatgtacacactcacacacacccgacagacatcacacactgcacacacaccatgtatacatgcacacacacccccacacatcacacacaccacataccacgtgcacacgcacacaccacagacaccacacattgcacacacaccatgtgcaca

SEQ ID NO: 1836 - DNA, 129 bp, Protomyxzoa rheumatica
tggcaggcatccttgtgttataaacaaaccactttacactgtctgtgtacttacctagggcctgctgattccctgatgggaaactaagcatattttgctaaagaaaaatgatggggcagggagcactgg

SEQ ID NO: 1837 - DNA, 191 bp, Protomyxzoa rheumatica
tccattccattccattccattccactccactccattccattgcattccactccacttcaccccactctgctccgttcaattccattctttcccttttgaatccattgcattgcactctactccgctccacaccgctccattcaatttcactctttcccattccattccactccactccaatccactccatt

SEQ ID NO: 1838 - DNA, 138 bp, Protomyxzoa rheumatica
gagtggagtggaatggaaaagaatacattggatacgaatggaatagaatggaatgcagaagataggagtggagtggaatggatcggagtggaataaagtggagtgcagtggattggaatggaatgtagtggaatggaa

SEQ ID NO: 1839 - DNA, 153 bp, Protomyxzoa rheumatica
cattccatttcataccattccattccattccattctattccactaggtttgattccattccattacactccaatccattccattcagttacatttcattgctttacattccattccattcggttccattccactccactctactcgggttgat

SEQ ID NO: 1840 - DNA, 124 bp, Protomyxzoa rheumatica
atggaatgcaatggagtggaatggaatggaatggaatggatcagagtggaattgtacagaatgcagtggagtggaatggaatcgaatggaagggaatgtagtggaatagaaagtaaaggagggg

SEQ ID NO: 1841 - DNA, 159 bp, Protomyxzoa rheumatica
aatggaatacaacggaaggcaatggagtggaacatcatggaatgaaatgaagttgaatggaatggaatgcagtggagtggattggattggagtggaatggaagggaacagagtggattggagtggactgcattggagtggagtggtgtggaatggagtg

SEQ ID NO: 1842 - DNA, 130 bp, Protomyxzoa rheumatica
gttttcttttcttttctttccttttcttcttttcttttctctcttcttttttcttctctcttcttccttcctttctttcttctttctttctctcgctctctctctttctttctttctctctttctttctc

SEQ ID NO: 1843 - DNA, 197 bp, Protomyxzoa rheumatica
cggagtggaagagaatggaattgaatggaatggagtggagtggaatggggtgggatcgggtggaatgaaatggaatgcgcaggactggaatggaatggaattcaatttattggaatggaatggaattgaatggaattgaatggaatcgaatggaatggagtggagaggaagggaatggattagagtggaacagaatg

SEQ ID NO: 1844 - DNA, 228 bp, Protomyxzoa rheumatica
caccacatacaacacacaccacacaggtacgcacacaccacacatacagcacacacgcacaccacacacaccacgcacacaaaacacaccacacagtaacacacacatcacataccacacacaccccacacaggtacgcacacacatgccacacacacatgccacatacaccacacgacacacaaaaaaacactacacacaccacacacaaacacacaccacacacac

SEQ ID NO: 1845 - DNA, 239 bp, Protomyxzoa rheumatica
ggaatggaatggaatggaatcaactagagtggaaacgaatggaaaggaatggaatggaatggaatggagtgtaatggaatggaatggagtggagtagaatggagtggaatggaactgaatgtactagaatggaacggaatggaatgcaatggattcgaatggaatggactcgaatgtaatggaccggaatggactggacgggaatgaaatggactcaaatgacatgtactctaatggta

SEQ ID NO: 1846 - DNA, 175 bp, Protomyxzoa rheumatica
attccatccgattccttccattctattcctttaaattccattccattaactccattccattcgtttccatttcattcgagagcactctgctgtagtccattccattccagtccattccattcgagtacattccactccagtccattccatttgagtccattccattccagtccat

SEQ ID NO: 1847 - DNA, 152 bp, Protomyxzoa rheumatica
ttccattctagtccattccattccattgcattacatgtgactccattccattcaattccattccaatacattgcatttgataccatccattccagtccattctgttcgaatcatttccattccattccattccatttgattctattccattc

SEQ ID NO: 1848 - DNA, 143 bp, Protomyxzoa rheumatica
tcatgtgtatactacgagaaatcgtgcggtacatacacaaatcagaaaaagaaagaaaaataataacatcatgcacataaacaaaacatataaaataaaaaacataaaaaagattggtaggtttggtccgatctaaagtaatg

SEQ ID NO: 1849 - DNA, 157 bp, Protomyxzoa rheumatica
ctttccactccattccatttgggtccattccattcaactccactggagtccattccattctgttccattagattcgagtccattccattttatatcattcgagtccattccattcctttatattcgagtacattccattcccttccactccatgtac

SEQ ID NO: 1850 - DNA, 123 bp, Protomyxzoa rheumatica
cattccactccactccactccattcaattccattccacccttttcctttccactccattcctctccactccacttcaccactttcctttcaattccattctatgttgttgattcctttccaat

SEQ ID NO: 1851 - DNA, 230 bp, Protomyxzoa rheumatica
cacggcgtgtgtgtagtgtggtgtctgctgtgtgcagtgtgtggtgtctggggtgtgcatgtgcacatggcgtgtgtggtgtgtgtggtgtatggggtgtgtgtgtgcacatggtgtgtgtgtgcagtgtgtgtggtgtctggggtgcatgtgtgcacatggagtggtgtgtgtagtgtgtgtgatgtctggggtgtgcatgtgcacatggtgtgtgtgcagtgtgtgtg

SEQ ID NO: 1852 - DNA, 133 bp, Protomyxzoa rheumatica
ggttcgcattgttgatgctctgtcattcgtaactaggccgagatggcgcgacgtacctccggaattcgacgagaaagatcgctttccgtggcgatttcgtcgacgactctcggtattgcggcgtccgttgctt

SEQ ID NO: 1853 - DNA, 127 bp, Protomyxzoa rheumatica
gaattccattccactccattccatttgattccattctattccattccacgccactagcgtatattccattccattcgagtcctttctattctatatcattcgagtccattccattcttttccattct

SEQ ID NO: 1854 - DNA, 138 bp, Protomyxzoa rheumatica
gaatggaatggaatggaatggaatagagtggagtggaatggaatgaagtggagtcgaactgaatggagtggagtggagtgaaattgaatggtgtggagtggaaggcaaagaatggaatggaatgaagtggagtggact

SEQ ID NO: 1855 - DNA, 235 bp, Protomyxzoa rheumatica
ccattccattccattccattccattagagtccctaccattccattgtattagattccaatccgttagtgtccattctattaaattccattcctttctattcgaggccattccattcaattcgagtcctttccattccattcccttcaaatccattcctttcctttcctttctattccattcaactccattccattctattccattgcattcctttatagtccattcaattccatt

SEQ ID NO: 1856 - DNA, 194 bp, Protomyxzoa rheumatica
ggcgtggagtgtaatataatagaaggtactggagtagagtgaggtggattgtagtggagtggagtggaattgaatggaatggaggggagtggaaaggaatggaatggaatggattggagtggtgtggagtggagtgaagtagagtggaatgcaatgaaatgtaatggaatggaatggacacaaatggaatggta

SEQ ID NO: 1857 - DNA, 175 bp, Protomyxzoa rheumatica
tggaatggggtggagtggagtgtggtggagtgcagtggaatggaatacagtggagtgaagtggaatggaatggagcagaattgaatggagtgaagtggaaaggagaagagtgaagtggaatggagtggagaggagtcgaatggaatggaatggaatggaatggaatggaatggaa

SEQ ID NO: 1858 - DNA, 131 bp, Protomyxzoa rheumatica
gaatggaatggaatggactcgaatggaatggaatggaatgcactcgaatgcaatggaatggaatggaaaggacctgacagtaatggaatggaattgaatggactctaatagaatagaatggaaaagactgg

SEQ ID NO: 1859 - DNA, 176 bp, Protomyxzoa rheumatica
attccatttgatgatgactccgtttgatttcattcgatgattctatttgattcctttcgatgatgattccattctcttccgtgcaatgattccatatgattccattcaatgatgattctattcaattccatttcatgttgattccatgtgattctattcagtgatgattccatttg

SEQ ID NO: 1860 - DNA, 208 bp, Protomyxzoa rheumatica
attccattccactccattccattccattccattccattcccttccactccactccgtttcattccatttcactccattccatttcattcaattccactcaattccattccactccattcaattccattccatagctctccactccactaccctccattccactccactacactccaatcatttccattcaattcccttccattccatt

SEQ ID NO: 1861 - DNA, 129 bp, Protomyxzoa rheumatica
aaggcaaacaacaccaaggcgtgcagctctcctttgaacatgtcacggtctttggcatagctcgcacccactatcagggtgaatgcaatggccagggcagaaaagcctttcaacaccaacgccatgctg

SEQ ID NO: 1862 - DNA, 204 bp, Protomyxzoa rheumatica
cgattccattccattcattttatttccatccgaccccattccattccattcctttccattcgattaaattccattcgaattcatgtgattctattctgttatattctagaccattccattccagttgattctattcaattcgtttccattcgattacattcctttcatttccattctattcgagtccataccgttagactacat

SEQ ID NO: 1863 - DNA, 363 bp, Protomyxzoa rheumatica
tggattggagtagagtggaatggaatggagtggagaggaatggagtggaattaagtggagtggagtggaatggaatggagtggagtgaagaagagtggacgcgattggaatggaatggaatggaatgggatggaatcgaatggaatgaagtggaggggagtggaggggagtggagtggagagaagggacgaggagtggaaaggaatgctattggataaaatagaatggagtggagtggattttggtgacgaagagtggagcagagtggaatgaaatggaatggaatgaagtggagtggagtagagtggattggggtggcatggaatggaatagaatggaatggaaaggaaaggaatggaatag

SEQ ID NO: 1864 - DNA, 242 bp, Protomyxzoa rheumatica
gcccggattgctggccaggttcgcggtgtcgggcagatggtcgaggatgaacgctactgcatcgacatcctccaccagattcatgccgtgaaggcagccctctcaaaggtcgaggatagggtcctgcggtcgcacgctgcctgttgtgtcgaggaggcgatggcctccggcgatcccatccttcagcgaaggaagttcgacgaactcgtcgaggtcttcgccaaggcgaagctctgatcaga

SEQ ID NO: 1865 - DNA, 166 bp, Protomyxzoa rheumatica
caaataaagatgggtttagaagttaacacagatgtgtattatggtaaattatgaaagtgtaaaatgaaggtgtattaagaactatgtggagatataaaaagagtggaaagtgttgcctttggttttcagataagaaactcgtagaaaataataaatttaactaaat

SEQ ID NO: 1866 - DNA, 155 bp, Protomyxzoa rheumatica
tggaatggaatggagtggactcgaatggaatataatgggatggaattgcctcaaataaaatggaatggaatggaaatgactcgaatggaatggaatggacacgaatggaatggactggaatgtaatggactctaatgttaaagaatggagagcac

SEQ ID NO: 1867 - DNA, 220 bp, Protomyxzoa rheumatica
tgtccatgtgtgtctgtgtatgtgtccgtgtgtgtttccgtgtctgtttctgtgtgtccgagtctatgtttctgtgtgtatctgtgtgtctgtgtctatgtctgtttctgtgtatatgtccatgtgtgtctgtgtgtgtctgtatctgtgtttgtgtgtgtgtccatgtctgtctgtctgtgtatgtttctgtgtgtgtgtgtctctgtgtgtctgtctg

SEQ ID NO: 1868 - DNA, 157 bp, Protomyxzoa rheumatica
agcacagagacaggtgtatcataatcatttagtattgctaaataaaattttttaatgaaagagaaggtgaataaatagatatttgaattagggttttagttgttttttcattacctcaaggttcaaactgaaatgtaggattcacagtaaaccacac

SEQ ID NO: 1869 - DNA, 128 bp, Protomyxzoa rheumatica
tatgtgcactgataaccccaggaaggaaacccttgtctacactctgcctactggaggctttaggacttattcctgcactgaacactaggtgatgtaacacatgtttaggctctgtctgcacgggaatt

SEQ ID NO: 1870 - DNA, 164 bp, Protomyxzoa rheumatica
atggagtcgaatggaatggaaccaaattgaatgaaatcgaatggaaaggaacttaatgtaatcgaaaggaatagaatggaatgaagtgtaatgaaaatatataaaatcgaatttaatggaatggaatggaatggaatggagtcaaaaggcatggagtggaatgg

SEQ ID NO: 1871 - DNA, 167 bp, Protomyxzoa rheumatica
attcaattatatacgagtaaattccattcgtgtccattccttttgtgtccattctatttgattccattccattcgagcccattacctttatggccattccattccattccattccaatccattcaattccatttaattcgattgcattccattctattctattccat

SEQ ID NO: 1872 - DNA, 144 bp, Protomyxzoa rheumatica
caccacatacacaccacactcacatatacataccacacacaccacacttcacccctgcacacacaaccctacacacatcacctacactctgaatacacatcacatacccacacatatttaccacacacaccacacatcacccac

SEQ ID NO: 1873 - DNA, 136 bp, Protomyxzoa rheumatica
tgtaatggattggaatggaatataatagaatggaatggaatggaaggaatggaatggaatgggattggaaggaacggaatcgaatggaatggaatcgaacggaatgggattgaaaggcatacaacaaatggaatca

SEQ ID NO: 1874 - DNA, 151 bp, Protomyxzoa rheumatica
ccattccattccattccattctattccaccccacttcactgcactccactgtattccattccatcccactccattcaactcccttccactccagtccattccacaccacttcactccattccattcaactcccttccacttcagtccactc

SEQ ID NO: 1875 - DNA, 124 bp, Protomyxzoa rheumatica
cacacatacacacaccacacacacatatacacgccacacacatacacacaccaaacacacaccacacacacatacacaaacacacacatacacacaccccccacacacacaaaccacacacacc

SEQ ID NO: 1876 - DNA, 210 bp, Protomyxzoa rheumatica
gaatggaatggaatggagtggagtggattggagtggagtgtattgaaatgcagtggaatagaatggaattggatggaatggaatggagtggaatggaagggaatgtagtggagttgattggagtgtagtggagtggaatagagtggagtggaatggaatagagtggagtggaatagactggaatggaatggaatggaatggagtggattg

SEQ ID NO: 1877 - DNA, 164 bp, Protomyxzoa rheumatica
gtatgtaattcagtggaatggaatagaaaggaacggaaagtaacggagtggagtggaggggagtggagtcgattcaagtggttcgcagtgcagtggaatggagtggaatggaatggaatagagtagaatggagtggagtggaatggagtggagtggagtggaaa

SEQ ID NO: 1878 - DNA, 131 bp, Protomyxzoa rheumatica
agtatataatatgtattttatgtactttgatattatatgtacagtatgtaaaatgaatttgatgtactttgattttttatatacagtatataataagtattgtgtgaaatttgatattttatgtacaatat

SEQ ID NO: 1879 - DNA, 139 bp, Protomyxzoa rheumatica
tgaacacatcaaccagtgaaacagaagagagagcctaataataaactcatacatttacaatcatttgattttcaacaaaggtcccaaaaacacacaatggaaaaaaaaagtctctccaataaatatgttgagaaaactg

SEQ ID NO: 1880 - DNA, 360 bp, Protomyxzoa rheumatica
tggagtgaatcggagttgcagtggaatggaatggaatggaatggagtgtagtgtagtggaatggagtggagtggagtggattcgagtggagtggagtgtaatggagtggaatggaatgcagtggaatggaatgaaattgaatggaatggaaaggaatggaatggaaagcaatggaatgaaacagaacagaatggagtggagtggaatggatttgagtggagtggattggagtgcagtggagtggcatggaatggaatggaattgaaaggaatggaatggaatggagtgcagtgcaatgaaatggaatgtaatggagtggagtgaagtggaaatgaatgaagtggaatttagtaaaatgga

SEQ ID NO: 1881 - DNA, 145 bp, Protomyxzoa rheumatica
taataaaattgaaagaaatggactcgaatcaaatggaattgaatggactggaatcaaatggttaggaaaggaatgtaatgggcttgaatggaatggaatggaatgaacacaaaaggaatggaaaagcatggaatggaatggaaag

SEQ ID NO: 1882 - DNA, 203 bp, Protomyxzoa rheumatica
gaatcgaatggaatggagtggaatggaatggaaaagaattgtatggaatcgaatggacttaaatggcatagaatggaatggaatcaaatggacttgaaaggaatggaagtgaatttattcgaatggaatggaaaggacaggcatggaatggaatggaatgcacttgaatgtatttaaatacaatggaatagaatggaaaagag

SEQ ID NO: 1883 - DNA, 148 bp, Protomyxzoa rheumatica
cacacatatacacacacatcacttacccactgtacacatcacacatacacaaacatcacacaaacacaccacccatacacaccacacacaaacacaccacccatacacaccacatatacacctacatacatcatacacaccacacaga

SEQ ID NO: 1884 - DNA, 126 bp, Protomyxzoa rheumatica
ctaatggaatttattcgaatagaatgaatcgaatgaaatgcaatagtatggagtggaatcaaaatgaatggaatcgaatggaatggaaatgaatggaatggactggaatagaacggactcgtatgt

SEQ ID NO: 1885 - DNA, 152 bp, Protomyxzoa rheumatica
gaatggaatggagtggagtggagtgaggtggaatggagtgaaatataatggattggaatggagagcattggagtgtaaaggggggagtggaatggaatggagtgatgaatagtagagtggaatggaggggagtggagtggagtggtgtagaa

SEQ ID NO: 1886 - DNA, 134 bp, Protomyxzoa rheumatica
tggaatggaatggaatggaatggaatggaatggaatataaaggaatagtatggaatggaatggaacagactataatggaatggactgaaagggaatggaatagaacggaatagaatggaatggaatggaatgga

SEQ ID NO: 1887 - DNA, 124 bp, Protomyxzoa rheumatica
cactccaatccacttcattccattccaattcactccattccaccctactccattccactactctccactccatttcaacctactccattacactccactactctacattccaatccactccgtt

SEQ ID NO: 1888 - DNA, 136 bp, Protomyxzoa rheumatica
tgtgtgaaagcttttgtgtgagtggattcattttgtggaatccaaaaaggttctatgttttgaatctggtatgtgcagagcaaaattagatacttcacatgcaaaatggaagggagagaacaaaggatcactttag

SEQ ID NO: 1889 - DNA, 250 bp, Protomyxzoa rheumatica
acggcatggagtcgaatggaatgcagtagaatggaattgcatggaatggtttggaaaggaatggagtggaatggaatggagtagaatgaagtggagttgactggaatgcaatggagtagaatggagtgtagtggaatggaatggaatggattgtagtggaatggaatggaatggaatggattggagtggaatgcagtacaatggagtggagagtaatggaatggagtggcatgtaatggagtggaataga

SEQ ID NO: 1890 - DNA, 129 bp, Protomyxzoa rheumatica
catctcttcaataaataaaaacatgaagatgccatatgaaagaatgggaatcttcaaacagtttcttaaaaacatttacaaacacccagttaaagatataggttacttgggaactccatttaatatggg

SEQ ID NO: 1891 - DNA, 196 bp, Protomyxzoa rheumatica
gaattaaatgagactatcaagtggtcaagggctgtaaagaatgacctccagaggggagtcaagtatcaattttcggagcagttagtgattggaagcctttaccgaccatttgttaaacgtagcctctatttcagttcgcagttgaatgagatgcaataccagatgccgagcttcttcggcgctaaccggagcaacg

SEQ ID NO: 1892 - DNA, 130 bp, Protomyxzoa rheumatica
agtgtagaaatgcgccacaatgcctccagtggacagatatagacaacagttacatcatctgcatgatcactgtagagacatgtcacaatgcccctgtaggcagagcgtagaaaagagtcccatcacctgg

SEQ ID NO: 1893 - DNA, 166 bp, Protomyxzoa rheumatica
gaatggaatggactcgaatggaatgcaaaggattggacctgaatggaatggaatggaattgaatggtatggcatggaattcaatggatttgaaaggaaaagaatgaatggaatggaatggacatgaaaggattggaatggaatggactgaaatggaatgcaatgta

SEQ ID NO: 1894 - DNA, 180 bp, Protomyxzoa rheumatica
tccattccattccactccactccactccatgcgactcctctccatttcactccactccactataatccactcctaccaactccactctattccattccacaccaccccatgccaccccactccactccgttggattccattgccttccactccatgccacctcactccactccactccac

SEQ ID NO: 1895 - DNA, 125 bp, Protomyxzoa rheumatica
ctctccaatccactccactccagtccattccattgcactccgttccgttccaatccactccactgcactccattcttctccactccattcctctccaatccattcaactccactccactcctttg

SEQ ID NO: 1896 - DNA, 136 bp, Protomyxzoa rheumatica
gaccgggaacgagggctggacgtggaaggattattatatttcggcactctacgggcgctcatttgagatcagggccaaagacgggacaatttataggagcttgcgagaagtgacagaacaggcgcagcagctacta

SEQ ID NO: 1897 - DNA, 236 bp, Protomyxzoa rheumatica
ttcacctgacatcgagattgataccattctcgacgcacttagaagctacactgaatcacttagagctgagactgcggaactacttattccgggaaatgatttatcatcgatagttccttaaaaacacggcataaggtgagcgcaactcggccactaagcctattctcttttgtacaggctcttggtcgttgaggcgagctggctctgcaaggacttcaagacaagccttatctacg

SEQ ID NO: 1898 - DNA, 160 bp, Protomyxzoa rheumatica
taaatatatgatggcagaaatgaaaatctcaaaagtgaaagtggaaaataaagtgaaatgaacctttgaaaatgtagagcaaataaacaaagaaatagaaaatagaaataggagtatagaaatagaaaataggaaaggaagatgataacatcacagcatt

SEQ ID NO: 1899 - DNA, 144 bp, Protomyxzoa rheumatica
attccatccaatttcacttgattttattcctttccattccgtttcaatccattccattgcattacattccattctattccatttctttccagtccattcccctccattccattccattcctctcacattgaatccattccattt

SEQ ID NO: 1900 - DNA, 141 bp, Protomyxzoa rheumatica
agctggcaaaaggggacattgtcacagcccgcccactcaaccaggccttgtttctctcctttaaaaatgggcatgacttctaaaacatgtaaaacaaaaagcctcctaaggatactggaaaagatcagtggtttttgcaag

SEQ ID NO: 1901 - DNA, 150 bp, Protomyxzoa rheumatica
attccattccattgcatttctttccactgcattccattccactccattgcattgcattccgttccattccactccattacacaccactccgttccactccattccattctgttacattctattcctctacattctattccattccattcc

SEQ ID NO: 1902 - DNA, 182 bp, Protomyxzoa rheumatica
aaatggcatacagcaggcaatcaattatttattgaataaataaatgagcattttaggataaattattagaagaaacctactgagtcaaaggtactgtgaacatttttgaggttttggatgcacatttccaaactgctttccagaaaactgtgcaactgtgcactctgttagcagtgcgtgca

SEQ ID NO: 1903 - DNA, 159 bp, Protomyxzoa rheumatica
aacggaatggaatggaattgaatggaatggaatggtatgggatgggatgggatggaatggaatggaatggaatgggatggaaaggaatgaaatggaatggagtagagtggagacgaatgtaatggactggaaggaattggagtggaatggaagggaatg

SEQ ID NO: 1904 - DNA, 133 bp, Protomyxzoa rheumatica
catacatacacaccatccacaccacatgtaccacacagacaccacaccacacacacacaccacacataccacccatgcatcacgccatacacacaccacacacaccaaacacacatacacaccaggtatatca

SEQ ID NO: 1905 - DNA, 147 bp, Protomyxzoa rheumatica
attccatttgatgattactccgtttggttccatttaatgatgatttcattcagttccatttgatgatgattcctttagattccattagatgattccatttgattacatttattgatgactccatttgattccattcaatgatgaatc

SEQ ID NO: 1906 - DNA, 124 bp, Protomyxzoa rheumatica
ttccattccataccataccattccggtccgttccattccatcccattctggtccattcctttccattctattcgagtctattccattccattcaagtccatgacattccattcctttccactcg

SEQ ID NO: 1907 - DNA, 147 bp, Protomyxzoa rheumatica
catcgcagttgccaccaaagcgtccgagcgaattccctcgcgccaccgggccagcactgaagcctgggtccgggcgacggtgacgatgagcggatagcgctgcacccgctcataggcatagtatttggtcaggttgtcgaacggaga

SEQ ID NO: 1908 - DNA, 139 bp, Protomyxzoa rheumatica
agtgcaatggagtggagaggaatgtggtggaaaggaattgaatggagtggagtggagtggaaaggaaagtaatggaattgcatggaatcacaaggaatcgcatggaagtgaatcaaattgaatcaaatcgaatcataag

SEQ ID NO: 1909 - DNA, 201 bp, Protomyxzoa rheumatica
tctccattccaatctatgtcatgccattactctcaactccattccattccactccactccacttcactccactcacttccattccattccattccattctaagccattccaatccagtccatttcactgcattcaattccactccagtccactccattcactccattccattctattccactccactccactccattccat

SEQ ID NO: 1910 - DNA, 164 bp, Protomyxzoa rheumatica
actacaatggaatataatggaatggaatctaatggaatggaatggaatgaaacggacatgaaaggaatgcaatgaaacagactcaaaaggaatggattggtattgaatggaatggaatgaaaaggaatggaatttaatggaacggaatggaatgaaatggaaag

SEQ ID NO: 1911 - DNA, 172 bp, Protomyxzoa rheumatica
ttctggcttagagaatgccttccttctcctggttcacgagatgccacgcgtggaccatagcacagagggcggcacagaggccctggaagatttaccgcaggaaactcagttttcattccttcctccttctcctccctctcttagttcctccctcacaccatccttcttttcc

SEQ ID NO: 1912 - DNA, 123 bp, Protomyxzoa rheumatica
tttgatattttatgtaccgtatataatatatatatgggaaatttgatattttctgtacagcatataatatatatttttggtactttaatatcttatgtacagcatacaatatatactttgtgt

SEQ ID NO: 1913 - DNA, 130 bp, Protomyxzoa rheumatica
agctttgaacttaaaatacctgaagggaacgacgatagaacacaggatacatttcactgagtggccctacaaacagcgcagttaattctgcttgcttgtgttttgtgtgctgtgtgtgtgtgtgtgtgtg

SEQ ID NO: 1914 - DNA, 141 bp, Protomyxzoa rheumatica
tatgtatgtgtgtgtatgtgtgtgtatgtgtatgtatgtctaatgtatgtgtattgtgtatgtgtatgtgtacgtgtgtatgtctaatgtgtgtatgtgtatgtgtgtgtatgtgtatgtgtgtatgtgtgtatatgtatg

SEQ ID NO: 1915 - DNA, 189 bp, Protomyxzoa rheumatica
tggagtggagtggaatggagtggagtggagtagaaaggaatgcaaaggaatgggatgaaatggatttgattggagtggagtgtaatggaatggagtggaatggagtggagtgtaatggaatgaagtggagtggagtggaatgtaatggagtgggaagcaatggaatggaatggattggagagcaatgga

SEQ ID NO: 1916 - DNA, 145 bp, Protomyxzoa rheumatica
gaatggaatggaatggaatggaatcgaatgaaatgtaatgtaattgaatggagtggaatggagtgggatggagttgaatagaatggagtggaatgcaatggaatcaaatgaatttaaatggaatggaatggtatggaatggaatg

SEQ ID NO: 1917 - DNA, 141 bp, Protomyxzoa rheumatica
aagtggaatggaatggaatgcaatggaatggaataaaatgcaatgcaatagaatggaatagagtggaatcgagtggaatgggatcgaattgaatggaatcaaatggaatggaatcaaatgtaatggactggaatggaatgg

SEQ ID NO: 1918 - DNA, 136 bp, Protomyxzoa rheumatica
cagcaataatttgtgggcccacctgaaatctgctgaaggcctcttttgggttaattttcagctcaagtactgtgctctggaagccatcattttctatctcttcagaaggggacttaaagtgcttctgaatgggttg

SEQ ID NO: 1919 - DNA, 136 bp, Protomyxzoa rheumatica
aataacaaaatcaagagcaacaggatcaccacacacaaaaaaagcattttagaaattcagtaccaattctatcaaaaactatcagaaaacctgaaatataaggaaagttcctcaatatcataaaggacaactatga

SEQ ID NO: 1920 - DNA, 191 bp, Protomyxzoa rheumatica
tgtgtgtgtatgtggtatgtgataatgtatatggtgtgtgttgaatgtgtgtatgtggggtgtgtgtggtgtatgttgagtgtatctgtgtggtgtgattatatgtgtgtggtgtgttgaatgtgtgtgtatgtggtatagtgcatttatgtggggctcgtgtgtgtggtatgagtacatttgtgtggtgt

SEQ ID NO: 1921 - DNA, 154 bp, Protomyxzoa rheumatica
cgtcaccgccactcctgctcgtcttgacctaaacaacacgttcgacaatgacaatgaacagtgggtcaattttccgccgcatgacgcctacaccggccaagacgtcttctttcccatagatgccccagttcaatattcactagttacgctacca

SEQ ID NO: 1922 - DNA, 156 bp, Protomyxzoa rheumatica
gaatgtagtggagtggaatggaatggaatgatgtgcagtggaatggaaacaaatggaatggagtggaatggaatgcaatggaatagaatgaagtagagtgtagtggagtgttatggaatggaatagggtggaatggaagggtgtagaattgaatgc

SEQ ID NO: 1923 - DNA, 155 bp, Protomyxzoa rheumatica
tccactccattcaattctattccaccctattccattccactgcatttcaatccactccactcaacttcaccgcattacattcgattccatttcatgccatttgattccattccattcgatgccattccattcgattccatacaatgcaattcctt

SEQ ID NO: 1924 - DNA, 217 bp, Protomyxzoa rheumatica
ggtgggtgtaagccggaggggaagaagggcagagagaaggccaaggccagagacccaggcatgagttcctggggcttataggagacacctactgtaggtcatgttggcaagaagacacctggcgtggaggaatgtcagagcacggggacatagttagtgatgaagccagcaaggccacctaggcctcgtgaaccccgactaggagtgcagatgccat

SEQ ID NO: 1925 - DNA, 125 bp, Protomyxzoa rheumatica
aagaaaggttcaaatttgtgagaagaaaatacacatgtcaaagcagttttacagataacggctttctagtttttatctagggacattcactttttcactataggcttcaatgaactgcctaatat

SEQ ID NO: 1926 - DNA, 125 bp, Protomyxzoa rheumatica
tacatttgggtccattccattccattccattccatttcattcctttgtgttccagttcattccattcgattccattccattctattctattttattccattcctttcgagtccattccattccat

SEQ ID NO: 1927 - DNA, 127 bp, Protomyxzoa rheumatica
tatatattttttgtactttgatattttatgtaaaatatacaatatataatttgggtactttgttattttataattagtatataatatatacttttagtactttgatattttatgtactgtatataat

SEQ ID NO: 1928 - DNA, 151 bp, Protomyxzoa rheumatica
gactggactggagtttagtgacttggagttgcgtggaactgaatggaatggaaaggaatggaatggagtagaatggagtggaatagaatggaatggatttaaatggaatggagttgaatcgaatgcagtggaacagaatggaatgcagtgg

SEQ ID NO: 1929 - DNA, 241 bp, Protomyxzoa rheumatica
tccattccattacattacattacattctttcagacccattcaattcaactgcatttcattcgagtccattgaataccaatccattcctgtccgttccatgccattccattagagtccattcaattcccttccatccaattagtgttcattccattccattccattccactcgagtagtttccattccattccattcgagtccattccattccatttgagtccattccattcccttcgtgta

SEQ ID NO: 1930 - DNA, 130 bp, Protomyxzoa rheumatica
ccgtttctctccattccactcccctccactccattccattcctttccactccattcaattcctcaccactccatacaattccactccacaccattccatgccaatatattcctctctttcctttacattc

SEQ ID NO: 1931 - DNA, 159 bp, Protomyxzoa rheumatica
gaatggagtggagtggaatggagtggagtggagtggaatgcaatggagtggagttgagtagaatgaagctgaagtggagtgaaatgaatgggaatggaaatgattagatagaaatgtgctggaatggaatggaatggaatggaatggagtggaatgcaa

SEQ ID NO: 1932 - DNA, 126 bp, Protomyxzoa rheumatica
agaaaaaaaatgccttgtagtatttggggtattacttatttatgctatcaatgctaatgtttgcaagatgccttcagtggcacacacttttaaacaggggcataccatagcaagcgcatggtacac

SEQ ID NO: 1933 - DNA, 189 bp, Protomyxzoa rheumatica
ccattgatttccgttccaatgcattggattacattagtattgattccattccattcgaggacattccattccagtccattccatttgactcctttccaatccattccagtccatttcattcgatatctaccctttaccctccattccattatattccttttgttaccattcaattccattctattcgaa

SEQ ID NO: 1934 - DNA, 202 bp, Protomyxzoa rheumatica
tttccactgcattccactccagtacactgcactcatttccattccacccctttccattccactccattccacttcactccactttatttcatcgccttccattcgattcccttctatgccactggattccattccattcgattccattgcattcgatcccattacatttgattccctacaattcgattccattccattcgat

SEQ ID NO: 1935 - DNA, 147 bp, Protomyxzoa rheumatica
atcgagagcaactgcgaggggctggagcgcgacctttcggcccagaaacgtgggctggaaggtcaaattcgcctgggcgtgctgtcggccacgtcgatcatggcatcgatcctcagccttgccctcgctgaaaggatgccgctcttc

SEQ ID NO: 1936 - DNA, 164 bp, Protomyxzoa rheumatica
cactccactccattccactccattcgtttccactccattccattctacctaacttcaatccactcctgtccactccattctattccacttcattcaattccattccaatcctttccattccattcttctccattccattccgctccattcgactccactccact

SEQ ID NO: 1937 - DNA, 171 bp, Protomyxzoa rheumatica
tggaatggaatggaatggaaaggaatgaaatagactcgaatggaatggacttgaatggaaccgaatcgaatttaatggaattgaacacaatggaatcaaatggaatggaatcgaatggaatgtaatagaatgtagtggaatcgaatggaatggaattgaatggcatcaaat

SEQ ID NO: 1938 - DNA, 155 bp, Protomyxzoa rheumatica
ttccattccattccattccatcaccctcctttccattacattactctctactccattgcactccactccattccaatccacagaactccatttcattcccctccttttcattccaatctatatcattccacttcactccattccattccattcca

SEQ ID NO: 1939 - DNA, 138 bp, Protomyxzoa rheumatica
ccactcgattccactctgttcccttccactgcattccattcttatctattccatggcgtaccattcaattcaatttgattacatttcattcaatttcattccatagaaatcaattgcattgcaatccattacattcga

SEQ ID NO: 1940 - DNA, 159 bp, Protomyxzoa rheumatica
ccactccactccattttattccactccactgcattccattccattccactcctttccattccactccactccattccattccactccgttccactccactcttctcgattccactccaccccattccattccacaccctccactccattccactctatt

SEQ ID NO: 1941 - DNA, 144 bp, Protomyxzoa rheumatica
tggaatggagtggagtggagtaaaaaggaatgtagtggaatggagtggaatgtgtggagtggaatggaaaagagtggagtgtagtggaatggattggagtggaaagaaatgtaatcgaattgagtggagtgcaatatagtggag

SEQ ID NO: 1942 - DNA, 136 bp, Protomyxzoa rheumatica
gtggaatggactcaaatggaatacaaaggaatggagtggactccaaaggaattgaatgaaatggactcaaaaggaatggaaagcccacgaaaggaatggaatggaaaggaatggactgaggtggaatagcatggaa

SEQ ID NO: 1943 - DNA, 176 bp, Protomyxzoa rheumatica
cattccattccattccattccactccattcctttccattaaattccactccactccattccagaccattccattccacaccactctactccattccaatccattccattttcatccactccactcaagtccattactctccacctgaccagattgcaattcaattcattccattaa

SEQ ID NO: 1944 - DNA, 173 bp, Protomyxzoa rheumatica
ttccattccattctattccattccattccactccattccacaaggattgattccattccattcaactataatccattccattccattccattccactcggattgattccattccattccattataatccattcccatccaatccattccactggggttgattccattccattc

SEQ ID NO: 1945 - DNA, 179 bp, Protomyxzoa rheumatica
caactcgattccactccattccattccattgcataccattctattccattccattttattccattccattccatttgattaaaatccgtttgattccattccattcgaaacaattacattgcaatccattacaatcgagtccgttcttatccactccattccattctggtccattccat

SEQ ID NO: 1946 - DNA, 147 bp, Protomyxzoa rheumatica
tccactccattccattccatccgattccattcaattgtattcctttccattccatttcattccgttttattccattccattcgagccaattccactacagtccattctattcaagtccattctactccagtcaattccattcgagtc

SEQ ID NO: 1947 - DNA, 132 bp, Protomyxzoa rheumatica
tctctactccccttctttccattccattccattccactccactcctttcaattccacattgttcggttccattcttttccactccgttccattccacttcattccgttcctttcaattcctttccactccac

SEQ ID NO: 1948 - DNA, 342 bp, Protomyxzoa rheumatica
catgaatggaatggaatggaatcaaatggaatggaaatgaacggaatggaatggaatggaaaggaatggacttgaatgaaatagaatggaatggaatggacttgaaaggaagggaagtgaatagggtcgaatggaatggaatggataagaatggaatggggtggaatggactcgaaaggaattcaattgaatttaagggaagggactctaatggaatggaaaggaacggactcgaaaggaagagaacggaatggattccaatggaatggaattcaattagatggactcgaagggaaaggaatggaatggactggaatggaacggaatggaattgaatggact

SEQ ID NO: 1949 - DNA, 247 bp, Protomyxzoa rheumatica
aatcgaatggaacggaattgaatggaatcgaaaagaagagaatggaatggagcgtaatggaaaggtatcgaatggaatggaatggaatggaatggaatggaatgggctcgaatgggatggaatggaatagactcgaatggtatgaactggagtggaatgcagtcaaattgaatggaaacgaatggaatggaatggattggaaaggagtagaatggaatggaatcggatggaacacaatggaatggaa

SEQ ID NO: 1950 - DNA, 128 bp, Protomyxzoa rheumatica
cacaccacacacatgaatctactacacatacatcacacacatacagcaccacacgccacatagacatcacacacccctacatactccccacacacaccacacaacccacacatactccccacacactg

SEQ ID NO: 1951 - DNA, 131 bp, Protomyxzoa rheumatica
atacatattatataccatagataaaatatcaaagtacacagaatacatgttatatactgtacataagatatcaaacagtacacaaaatacatattacatactgtacgtaaagtatcaaaaattacaccaaa

SEQ ID NO: 1952 - DNA, 161 bp, Protomyxzoa rheumatica
tcacagttccattccattccattccatttctttccactccactccagtccactcaactccactgcactccaatcaactctattccattcctttcctttccattcctttccattgcattttcttcctttccattccattccattccactccactccactcca

SEQ ID NO: 1953 - DNA, 122 bp, Protomyxzoa rheumatica
attccattccagtccactccactccattccgcttcaatccacttcattccagtccacttcattcgactcgactcgattccattccaaacaatttcattccgatctataacattccactccac

SEQ ID NO: 1954 - DNA, 123 bp, Protomyxzoa rheumatica
aaggaatggaatggaatggatttgtaatggaattcaatggaatgtagtggagaggagtggcgtggagtggagtggagtggaatggattgttatggaatggaatgaagtggagtggagtggagt

SEQ ID NO: 1955 - DNA, 142 bp, Protomyxzoa rheumatica
aatcaaatgtaatcgaatggattccaaatgagtggattcgaatggcattgcatggagtggaaaggaatgcggtgaagtggagtggagtggaatgtattggattggaatggggtggattggaattctatggagtggagtggag

SEQ ID NO: 1956 - DNA, 153 bp, Protomyxzoa rheumatica
acccaatgaataaaaagtaaaatttacctctgtgagaaaaattcactcatcacaaagccatttcacagataggttccttctagtttttatctggagacatttgattatttgttataggcctcaatgggctcccaaataactcttcacagattc

SEQ ID NO: 1957 - DNA, 142 bp, Protomyxzoa rheumatica
cctccattttaccccactccattccattccactccactccatgctcctctaatctactccactccattccattccacctcaccccgttttattcctatccactccagtttctctccactccattccattgcactcatttcct

SEQ ID NO: 1958 - DNA, 232 bp, Protomyxzoa rheumatica
cctgcatgacatgtgatctgctcctcctccaggctataagtgtatgtaactaacaaactgctgctgagtttattgttccagtgtcagatgtagtgtgtttgcctatccctccaatcttgggatgggaatctcttcctcaccaatagtatgactagaaggcaagtaaaatccttccccttgtaacaagcacaccccttcccgtcgttaccaattaaatagagcaaattactat

SEQ ID NO: 1959 - DNA, 348 bp, Protomyxzoa rheumatica
actcaactgcaatctatattatgccattccattccattgcattcctatccactccactccactcccctccattctattccattccacccaattccattccactccattccacttcactccattccacttcaccgcattccatttgattccattcgatgcgattcgattccattccattcgattccgtttcactcaattcaattccattcaattccattccatccgattcaattccattcgagaccattccattgatatccattccattcgagtctgttccatttgactccattccgttccagtctgttccattccagtccgttcgattcgagtccattccattccatt

SEQ ID NO: 1960 - DNA, 186 bp, Protomyxzoa rheumatica
tgagtgcgtgtgtgtgtggtgtgtgcgtatgtggtgtgtgtgcatgtatatggagtatgagtgtatgtgtggtgtgtgtgtggtatgagtgtgtgtggtgtgtgtggtgtatgagtgtgtgcatgtgtgagtgtatgtggtgtgtgaatgtgtgtgttgtgtgtgcccttgtgtatgcggagtgtg

SEQ ID NO: 1961 - DNA, 198 bp, Protomyxzoa rheumatica
ggaatggaatggaatggaatggaatagaacggaatggaatagaaaggggtggagtggagtggtgtttagtgaagtagagtggagagcaatggagtgtaatgtagaggagtggagtggtgtggattggagtggaatggagtggtaaggaggggagtggagtggaatggaaaggaatggagcagaatgcagtgcaatgga

SEQ ID NO: 1962 - DNA, 139 bp, Protomyxzoa rheumatica
agtacgaggttagcggcaatcgcgggacgatacccaccaagctcgcccgtggcattgggacgattaatgaaacactgagaattcgtgtgaaggaaagatatggcgcctcagggctctaagagtatctacgaagctttgg

SEQ ID NO: 1963 - DNA, 125 bp, Protomyxzoa rheumatica
gaatttaatcgaatggaatagaatggacaaaaggtaatcgaatggaattgaatggaatcgaatagaaaggaatcgaatggcatcgaatggaactgaatggaatgcggtgaagtgaagttgagtgg

SEQ ID NO: 1964 - DNA, 191 bp, Protomyxzoa rheumatica
cagaaagccatcgagatagagccgtgcgatccgatcacatagttcgcgaggcttcatctttcctccaggccggaaccagagatcggtccagttcagcattccgatcagcagcatggcatagggcgcatagacttcgtcgggcatcccaggattgaccgcacgtagcaatccgctgagcgtccgcctcacct

SEQ ID NO: 1965 - DNA, 178 bp, Protomyxzoa rheumatica
taatcatgcatggagtttagaggatggctcaaattttttttttgtattattcatttgaaggttacctttagtttagaaagaattcaccaggaatggacactgagaaactcttttcccctttgccactctctgtcctttcctcagggcataagtgcttctccttgtgattaatacctgt

SEQ ID NO: 1966 - DNA, 254 bp, Protomyxzoa rheumatica
aatggaatggactcacatgtaatgcagttgaattgaaatgactcgaaaggaaacaaatcgagtggaatcgaatggaatgaaatggattggaatggaatgcaatggacatgaatggaatggaatagtatggacttcaatggaatggaatggactcgaatgaaatggagtggaatggagtcaactcgagtggaatggagtggaacggaatggactcgaatgaaatggagtgcaattgaatggacttcaaaggagtg

SEQ ID NO: 1967 - DNA, 194 bp, Protomyxzoa rheumatica
atggaatggaatggaatggaatgcgacggaatggaatggactagactagagatgagtggagtagaatggattgcagtggcctggagtggaggggagttgagaggagcggatcaaagtgcagtggagtggaatgcaatggaatgtaatggaatgaagtggagtggaatggaatggaatggagtggagtggagtgg

SEQ ID NO: 1968 - DNA, 169 bp, Protomyxzoa rheumatica
cattccattccactccactccattattttcctttccattccagtccactgcactccaatccattcctctcaacctcactccagtccactcctttccattccgttccattccattccattccatttcattcctttacactccattccactccactccactctactccact

SEQ ID NO: 1969 - DNA, 179 bp, Protomyxzoa rheumatica
caaatggaatggattggaatggactcaaaaagactggaatggaatggaatggcctcgaatggaatgggttggaatggaatagactcgaaaagaatggaatggtatggactcaaaaggaatagaatggaatggaatggacttgaatggaatcgaatggaatggactcgaatggaaaagaa

SEQ ID NO: 1970 - DNA, 139 bp, Protomyxzoa rheumatica
cttgaacggaattcaatgcaatgcaatggactcgaatggagtggaatggaatggatttgaatggaatagaatgcaatgcactcaaagggaatggagaggaatgcagtgcacaggaatggaatggaatggaattgattcg

SEQ ID NO: 1971 - DNA, 136 bp, Protomyxzoa rheumatica
taaatggaatggagtcgaatggaatataccggaacagaatggactggaatacaacagaatagaatgtaatggattataatgtaattgattcgacaagaatggaatagaacagaatgtaatcaaatggaatggaatg

SEQ ID NO: 1972 - DNA, 130 bp, Protomyxzoa rheumatica
tagtctttgccattaaaagtaattgtgatttttttctttacttttaatggcaaagactacaattacttttgcgacaacctaataacacacaaaaaaatcatttttggggggaaaataagcatatgctctt

SEQ ID NO: 1973 - DNA, 134 bp, Protomyxzoa rheumatica
gaatggattgaagtggaatggaatcgattgaatgtaacggagtggaatggaatggaatggagaggagtagaatggaatggattagaatgatgtggaaaggaatggagtggagtggaaaagagtggagtggagtg

SEQ ID NO: 1974 - DNA, 129 bp, Protomyxzoa rheumatica
aatggaatggattccagtggagtcgaattgaaaggaatggaatagaatagaatggaatcgaatgaaatggaattgaatggcatcaaatggaatcgaaaggaaagcggtgaagtgtagtggagtggagtg

SEQ ID NO: 1975 - DNA, 140 bp, Protomyxzoa rheumatica
atggaatctaatgaaacggaaaggaaaggaatggaatggattggaatggaatgggctggaatggaatggaatcgaaacgaatggaatggaatcgaactgcagatactgcaatggaatgtactggaatgcaacggagtgta

SEQ ID NO: 1976 - DNA, 164 bp, Protomyxzoa rheumatica
tggaatcgaatggaatgtaagcaaatagaatggaatggaacgcaatcaaatggaacagaatggaatgcaatgaaatggaacagagtggaatcgagtggaatggagtcgaatggaatctaatcaaatagaatgtactcgaatggaatggaatagaatggagtaga

SEQ ID NO: 1977 - DNA, 259 bp, Protomyxzoa rheumatica
tccatttgagtccattccactccaatccattcccttcgcgtccattccattccaatccattccatcaagtgcattccattccattcgatatctttcaattacaatccattccattctattcctttctattccgttcatttcctttctattacattccattcgattccattccattcgactccactgaaatcgagtccattccattccattccgttctgttcgattcaaatctgttcgattccattttgttccagtccat

SEQ ID NO: 1978 - DNA, 143 bp, Protomyxzoa rheumatica
aaagtataataataataaattaaaaacaactaactttaaaaaaagtaaaataaagtgttgaaaataaaaaaaaaagatttctgagaaactcctctgttatgtgtgcattcatctaaccagtttgaacctttcttttgattgag

SEQ ID NO: 1979 - DNA, 182 bp, Protomyxzoa rheumatica
gaaatttcctaaggttttgcagttggctaatttttattttattttagtgtgaatgagagaaataaataattttacaaaaaaaattattaagaaagtaatacaaataaaaattcaaatatgaatagcctcatttttgtgtgattatgattaacattacatgtatccttaattttaagagggtt

SEQ ID NO: 1980 - DNA, 233 bp, Protomyxzoa rheumatica
acattccattgaaatccactccattccattcctttgaaatcctctccattccattccattacattccaatccatttcattcctctcgactccattcaaatccactccattctattccattcccttccattgcattccattccattccacttcacaccctttccttgcattccactccactccactcttctccgttccattccattccattccattccaatcctttccattcca

SEQ ID NO: 1981 - DNA, 207 bp, Protomyxzoa rheumatica
cctctccattccattctacttcgttcccctccactccaccctattccactcccccgcattccaattccctccattcgattacacttgatgccattcaattcctctccactccattctattcccctccactccattccgttccagtccattccactctactccattctcctccactccactccattccactccattccatttaagtcc

SEQ ID NO: 1982 - DNA, 177 bp, Protomyxzoa rheumatica
attccattccactctactccatttctttccactccattccaacacaatccactccatttcactcaactcctctttattccattccactccacgccattccaccacactctattccactcctctccactccattccactacactcaattccattccattcctctccactccactccat

SEQ ID NO: 1983 - DNA, 237 bp, Protomyxzoa rheumatica
cattcaattccattccattccattccattcctatcgtggttattccgttccattccattccatttcattcctttccattccattcgggctgattcctttgcattccattccattccattcctttccgttgtattctattcaaagcaattccatttctgtccattccattacactcctctcactttgattccattctattccattccattccattctgttccattcctttcctttcca

SEQ ID NO: 1984 - DNA, 158 bp, Protomyxzoa rheumatica
acctcaacgaaaacaaaagggcccctttactgggtggcttccagcagcagaagcagaagtttctaaagccaaccagaggctctttatggggcccacaaatgggacatgttaccctgcaggccccctgacccatagcttccatcctcatcaccatgggc

SEQ ID NO: 1985 - DNA, 171 bp, Protomyxzoa rheumatica
ctgtattccattccattcaataccattccactccagtacattcaattcgagtccattccattcccgtgcattccatttgagtccattccataccattcgtttccatttgaaatctttccattacactcctttccgttcctttccatccgattcctttccattcaattcctt

SEQ ID NO: 1986 - DNA, 135 bp, Protomyxzoa rheumatica
ggaaccgaatgcagtcatcatcaaatgaaatcaagtggaatcatcgaatggactcgatggaatcatcatcgaatcgaatggaatggaatcatcgaatggactcgaatacaatcatccaatggacttgaatggaat

SEQ ID NO: 1987 - DNA, 205 bp, Protomyxzoa rheumatica
tccactccaatccactccgcttctccgcattcatttcgattccattcgattcaattcgaatcctttgtattctattccattccatttgatccattccattcgattccattccttatgattactttccattcgattccattcaatttgattccatccattcaattgcattccattcaattccattccattctagtccattccattc

SEQ ID NO: 1988 - DNA, 137 bp, Protomyxzoa rheumatica
cattcaggtccattcaattattattccattcgattctattcggagaatccttttgattctatttgataattattccattcgagacaattcgatgattccattcaattcatttgttggtgattccattcaattccatt

SEQ ID NO: 1989 - DNA, 167 bp, Protomyxzoa rheumatica
aatggaatggaatagaatgaaatggaaaggaaacaaatggaatggattcgaatggaatggaattgtatggaatggaatcgcatggaatggaaacgcaaggcatcgaatggaatggaatggaatttggtaaagtgcagtggcatggaatggaggggaatggaaaaggg

SEQ ID NO: 1990 - DNA, 152 bp, Protomyxzoa rheumatica
agccaggcaccctctcctgctgccatgacatcagccggcagcatggccagcaacaccatcctgtctgagtcacagcagaatctttctcttccttccctctctggtcaatctcccatctgcatcgcctactggcagaagcagacagaagcctg

SEQ ID NO: 1991 - DNA, 185 bp, Protomyxzoa rheumatica
aggttcttgccattccattccattccactccattcctttctattccattccactccattccactccacgccattccactaaactccatttcactccatggcacttcattccactccaagccactccactctaccttattccattccactacacttcattccattccgttcattctattcctttcc

SEQ ID NO: 1992 - DNA, 138 bp, Protomyxzoa rheumatica
tggaatggaatcgaacggaatggagtggaatgaaatgaactcaaatggaatgtgatggaaaggactcaaacggaatggaatgaactcgaatggaatgtcattgaatgaactcgaatggaatggaatggactccaatgg

SEQ ID NO: 1993 - DNA, 128 bp, Protomyxzoa rheumatica
cattccattccattccatttcattcgattcccttccattcccttcctttccattccatttatttcgagtccattccattccattacattcaagtgttttccattccattccgttccattgcgttcaat

SEQ ID NO: 1994 - DNA, 139 bp, Protomyxzoa rheumatica
tccttttgagtccattccattcctatccattccaaacgatttcattccatttgtgtccattccattccagtaaattccattcccgtccagtacattccactccattccctgagacaccattccattccatttgattcca

SEQ ID NO: 1995 - DNA, 133 bp, Protomyxzoa rheumatica
aacaaatggattcgaatggaatgcagtgaagcggagtggaatagagtggaatggattggaatgtagtgcggagaaatggaattgataggaatggagtggagtggagcagaatggaggagaatattatgcaata

SEQ ID NO: 1996 - DNA, 133 bp, Protomyxzoa rheumatica
ggaatgggatggactcgaatggaatggaatggaatggactctaatggaagagagtggattcgaatggactcgaatgcaaaggaatggagtggactctaatggaatggtttggatttgaacggtgtggagacga

SEQ ID NO: 1997 - DNA, 126 bp, Protomyxzoa rheumatica
atggcatggaatggaatggaatgaaatggaaacaagcggcatggaatccacacgactggaatggaatggaatgtaatgcaatgggattgagtggaatcaaccagtgtggaatggaatggaatggaa

SEQ ID NO: 1998 - DNA, 229 bp, Protomyxzoa rheumatica
tggatggaatggaatggaatggaatggattgcaatgaaatggaatggaatggaatggaatggaatcgaatcgaatgtaatggaatggcacggaatggaatcgaacaaaatggattggaattgaatggaatggaatggattggaaaggattcgaatggaaaggacaggaattgagtggaatcctatggaatggaatggaatggactcgaatggaatggaatcaaatggaa

SEQ ID NO: 1999 - DNA, 155 bp, Protomyxzoa rheumatica
gaatggaatggaatggaatggaatggactcaaatggagtggaatggaacagaatggactcgaatgaaatggaatggacttgaatcaaatttaatggaatggaatgcatttgaatggaattgaatggaatggacttgaatggaatggaatggactc

SEQ ID NO: 2000 - DNA, 123 bp, Protomyxzoa rheumatica
actaagcataatttcctggagattcatctaagttgttaagtgtactaatgcttggtttctttttattattgtcgtgttatatctagtggaatgtattaacaccctttgtttaactattcacct

SEQ ID NO: 2001 - DNA, 211 bp, Protomyxzoa rheumatica
gaatggaatggaatgcactggacttcaatggactggaatagagcagacacgaaggtaatgaattgcaatgtaatagaatcgaaaggaatgaaatcaaatgtaatggaaacgaatggattggcaacgaatggaaaggaatggaatgcacccaaatgtaatggactcgacaacaatgggcccaaatagaatgcactcggaaagaatggtctca

SEQ ID NO: 2002 - DNA, 144 bp, Protomyxzoa rheumatica
ttcccttctgttatattccacttcattccattcccgtccactccaatcaactccactccgtttcactccaatgctctccattacactccactttactccactacactacacaccacattgctacactccactacattccattcc

SEQ ID NO: 2003 - DNA, 128 bp, Protomyxzoa rheumatica
ggaatggaaaggaatggaaaggtaggtaaaagaaaggaatggaacggatgggaatgaagagtcctcgaatgcaatagaatggaatggaatcaaaccctgtggaatggaatggaatggaatggaatgga

SEQ ID NO: 2004 - DNA, 266 bp, Protomyxzoa rheumatica
gctgcactccgatacactccactcaacttctctccactctactccactccgttgcattccatcccaatccattccattccattccaatccactccactccactctatttcactccattccactccactcaactctaatccactaaactccattgcatttcactcgattccactccactccactccaatccactaaactccattgcatgtcactccattccactccattccactccactcctctccactcaactccattccattcct

SEQ ID NO: 2005 - DNA, 151 bp, Protomyxzoa rheumatica
cactccattccattcctatccattccattcgaattcattctgttacattccattccattcaagacagttgcattccagtccattctattaatgtccattctattcgattccatcccattctattccaatccattctattcgattcctttcg

SEQ ID NO: 2006 - DNA, 233 bp, Protomyxzoa rheumatica
tccattgctatccattccacaccactccattccattccactcctctcttttccgttccaatccattccattccattcctttccactccattccattctgttccactccacttcactccattgcactcctttccactgtgctccacttcattccattccattccattccactccattcaattccactccactcgattcccttccaccccactccattcgactccactctattcc

SEQ ID NO: 2007 - DNA, 158 bp, Protomyxzoa rheumatica
aatggagttgaatggaatggaatagaatggaatggaatggaatggattcgtaaggaatagaatgcaacggagtgtaatggaaagttatcaattggaatggaatgcaatggaatcgaatgcaatggactggaatggaatggactagaatggaatgggct

SEQ ID NO: 2008 - DNA, 208 bp, Protomyxzoa rheumatica
tcccttccattccataccaatccattcagttccattccatttcattccattccattcctttcgagtctatttcattccattccattccattccattcctttccattcaagtcaatttcattccataccaatcctttccgttccattccattccattccgttctagtttactccattccattccattccacttgagtcgattccattcc

SEQ ID NO: 2009 - DNA, 174 bp, Protomyxzoa rheumatica
actcttcaatcatggtgagcctggattttagtcttaaatctggcagtttgcaaatatctaatataaagtagattgttgaaatgagtctctggtttgctgatgggtctatagagattgcagttacactccaagaaaatgtcctctttccagtgatgaatatgaggagggtgtgag

SEQ ID NO: 2010 - DNA, 151 bp, Protomyxzoa rheumatica
cgttaaagacgatccacgagccgtagatcagcaagtgcaagtacacgaacctcatgctgcccgtaaaggacgtgatcgcagaggcgaccttctcttcgagtcccatggctagatgctcttgacgccgcttttcgcggagagcatcgatatt

SEQ ID NO: 2011 - DNA, 153 bp, Protomyxzoa rheumatica
ccacgcgcgtagaagacatcagcatccttctgcaaacgcgacacatcgatcgtacgggacataattcgatacaagattcccgccccaaaggggatagctgacggaattcgctttcgtcgaagaaggtataagtacgtttcacgagcgaaggcg

SEQ ID NO: 2012 - DNA, 209 bp, Protomyxzoa rheumatica
tccactccattccactccattccattccactccactccactccattacactccattacattccactccactccactccaatacactccatcccattcctgtctattccacttctttccaccacactcctttccattccactccattccattccatcccacgccagtccacttcactccactccactctgttccattccattccattcca

SEQ ID NO: 2013 - DNA, 246 bp, Protomyxzoa rheumatica
cactccactccattgctttccactccattccattccagtcaattccattccactccattcaattccaatccattccatgccattccattccactccattccattccactccattccattccgttccattccctttcattccattccattcgtgtccattacattccattcaagtccattccattccatatcattctattccattccattccatttgggtccattccattccattccattagactcc

SEQ ID NO: 2014 - DNA, 300 bp, Protomyxzoa rheumatica
gaatggaatggactctaatggaatggactggaatggaatggaatggattcgaatggaatggatttgaaaggaatggactggaatggaatggattcaaatggaatttactagaacggaatgaattcgtatggaatggaatggaatggactggaatggaattgactctaatggaatggatcagaatggaatggactagaaaggaatgaactcgaatggaacggactcaaatggaatggaatcgaatggaatggactggaaaggaatgaactcgaatggaaaggactcaaatggaatggaatc

SEQ ID NO: 2015 - DNA, 142 bp, Protomyxzoa rheumatica
gaaaggaatggggtggagtgaaatgcaatggagtgaaatggaatggcataggaaggaatggaactgaacgtagtggagtggtctggagtggagcggaaaggactggaatggagtggacaggactggactggaatggaatgga

SEQ ID NO: 2016 - DNA, 124 bp, Protomyxzoa rheumatica
ccttccgatccctttccatgccactccattccactacactgcactccactgcattctactccatgcaattccactccattccagtccattcctttctgtcgacgggatctcactctgtcaccca

SEQ ID NO: 2017 - DNA, 158 bp, Protomyxzoa rheumatica
tttacattccattctattccatttcagcacttttcattccattactttccttttgtgtccatttcatttcattacattcttttccattgcattcctattgagtccactcaattccattgcataccattcgtgtccattccattttactccattccatt

SEQ ID NO: 2018 - DNA, 151 bp, Protomyxzoa rheumatica
gagtggaatggaatggaatggtatggaatgggaggacatggaatcgcatggaatcacatggaaacaaatcgaatcatgctgaatcgaatcaaatggaattgaatggaatcaaatggaaaaaaggaatcgaacgaaattgaatggaatggaa

SEQ ID NO: 2019 - DNA, 134 bp, Protomyxzoa rheumatica
tggaatgggataggatggaatggaatgaaatggaatcgtgaaatgaaacgttagctgagattatgacactgtactccaaccttggtgacagagatcgtgtcgacagaaaagaatagaatggagtggaattgaat

SEQ ID NO: 2020 - DNA, 160 bp, Protomyxzoa rheumatica
ccaatcctttccattccattcaatttctttacattttactccattccattctattcctttcgattcaattcaattccattatatttcattccattccattcgattccattcaattcgaatccattccaatcgagtccattccataacattccttttcatt

SEQ ID NO: 2021 - DNA, 149 bp, Protomyxzoa rheumatica
cgttccattcctttacattccgttcagttccgttctgttccattcctttccactccactccattcccctccactatattccattacacccgattccattccactccattccactcctcttcacttcactgcactcaattccactccatt

SEQ ID NO: 2022 - DNA, 273 bp, Protomyxzoa rheumatica
ttccattccattccatttcattcgattccattccattcgagtccattcattcctttccattccattccactgcattccactccactccactccactctgctctactccattccttcgcattccattccactccattccaatccagtccagtccactccattctattcctatccactccattccactccattccactcctctccactccgcttcactgcaatccattccatgccgtttgattacattccattcaattccgttctaatccattca

SEQ ID NO: 2023 - DNA, 214 bp, Protomyxzoa rheumatica
ccactccattgtaatccactccattctattccacaccactctcttccattcctttccatttcattccattccattccaatgcattccattccaccctattccactccactccatttacctccaatcttctccattgcactccacttcattgcattccattccactccactccattacatttcaatcccctccattctattccattcctttccac

SEQ ID NO: 2024 - DNA, 105 bp, Protomyxzoa rheumatica
ggaatggaatggaatggaatggaatggaatggaatcaaaaaaagtggaatggaactgaataaaatagaatggaatggaatggaatggaatggaatggaatggaat

SEQ ID NO: 2025 - DNA, 144 bp, Protomyxzoa rheumatica
gaatggaatagaatggaagggaatggaatggagtggagagaaatgcagtggggtggattgaaatggagtggaatggaaaggaatggaaagggaagtagtggaatggaacggaatggaagggaattaaatggaatggaaaggaat

SEQ ID NO: 2026 - DNA, 141 bp, Protomyxzoa rheumatica
ctattgataccattccattcgattccattccattcgattcaattccactcgattacactccattccattccattgtattccattctattccattccttttaattccttaccattccattttattacattccattagattgc

SEQ ID NO: 2027 - DNA, 139 bp, Protomyxzoa rheumatica
acatttctaaccaaagctcatgaaatatcttttgttaactagtgtaggttacattaagattgaattgctttcctcaagaaccaaattgatttgagggaactttcttctttgttgttagtatagtcatttctatgatttc

SEQ ID NO: 2028 - DNA, 166 bp, Protomyxzoa rheumatica
ggagtggagaggagtggaatataatggaatggagtggagtggagtatagtggagtggagtggaatggagtggagtagaatgaaacggaatcgagtggaatggggtgaaatggagtgtagtgaattggaatggaatggagcagagtggaatggaatggaatggagtg

SEQ ID NO: 2029 - DNA, 124 bp, Protomyxzoa rheumatica
tggaagcgaatggcatctaatggaatgcggtgaaatggagtgaagtggagtggaatcgtgtggaatgcaatgtaaaggaattgggtggaatggaatggaatggagtggagtggagtggaatgga

SEQ ID NO: 2030 - DNA, 122 bp, Protomyxzoa rheumatica
gaatggaatggaatggagtcgactggaatggaatggaattgaattgaatcaatctgagtcgaatggaatggaatggaatggaattaaaattaatggaatggaatggaatagaaacgaaatga

SEQ ID NO: 2031 - DNA, 196 bp, Protomyxzoa rheumatica
tcctttccattccattcgtttccattccattccattatattcgagtccactccatcccattccatcctattccattcgagtctattccattccattgcatgtcattccaatccattcaactgcattccatttcattcgagtctattcctttccattacattcgaatcgattccattccattccacttcattcgggt

SEQ ID NO: 2032 - DNA, 178 bp, Protomyxzoa rheumatica
gaatggagtggagtggattagaatttggtgaagtgaagtgggttgtactggagtggagtggaatttaaggagtggagtggattagagcaggagtagagtggaaaataatggattggagtgcaatgtagtcgagtggaacggaatggggtgaaatagatggaatggagtggaaagtagt

SEQ ID NO: 2033 - DNA, 140 bp, Protomyxzoa rheumatica
ttccattccattccattccattcaattccattccaatccactccagtcctctccattccaattcgtcccattacattccactccattccacatcactccactccactccactcaaaaccattacattcttttccatccca

SEQ ID NO: 2034 - DNA, 123 bp, Protomyxzoa rheumatica
tgcaatggaatggaatggaatggaatgtagtggagcagaggggaatggaacggaatgtagaggatgggaatggaatggaatgtaatgcaatggattggaatggagttgaatggaatggaatga

SEQ ID NO: 2035 - DNA, 125 bp, Protomyxzoa rheumatica
gtacagtatataacatacagtttgggtattttgatattttatgtgctgtatagaatatatagtttgagtacgtttttattttatttacagtttagtataaatgttagggtactttcataatttat

SEQ ID NO: 2036 - DNA, 185 bp, Protomyxzoa rheumatica
gaatggaatggagtagaatggaatggaatggagtggagtggaataaaattaagtggaatggagtggaatggaaaagaatgaagtggaatgcagtggaatggaatggagtgtaatggagtggaatgaaaaggaaaggaatggaatggagtggaatgcagtataatggagtgcaacggaatggagtg

SEQ ID NO: 2037 - DNA, 256 bp, Protomyxzoa rheumatica
agtccactccactcaacttctttccattccattcctttccgttttcttccattccattccattccattccacgccactacactccttttgattccattccactgctttccactccattccactccagtccattccactccattccactccactcaattccatttctttccactccattcaactccattccactccagtcccttccactccattccgctccattccatttcattccactccattccattccactcca

SEQ ID NO: 2038 - DNA, 140 bp, Protomyxzoa rheumatica
ctcctctccactccattccattccattccactccactccactcttctccattccattccattaaattccattcaattctagtttactccactcgattccactccagtccattccagtccacaacattccattgcattcca

SEQ ID NO: 2039 - DNA, 168 bp, Protomyxzoa rheumatica
aaagaataaacattgtgtttatataaactgcatagttatactatgttttatgaaagtccatttatatgaaaatctaatacattctccaagtcatccatctataacttatcctctcattaactctgagaactgcatttctttataattaaaaagaagagttaccttgtc

SEQ ID NO: 2040 - DNA, 124 bp, Protomyxzoa rheumatica
atttcattcatttgtattccagtcctttcccttcctttcccctccattccaccactctccattccattccattcgtttccactccaatccattccactcctttccattccactccactctgttc

SEQ ID NO: 2041 - DNA, 320 bp, Protomyxzoa rheumatica
tggaatggaatggaatggaatggaatggagtggagtgtaatggaatggatttgattggagtcaatggagtggaatggaatggaatggaatggagtggaatggagtggtgtggcgtggatggaaatggaatggagtggaatggagaggaaagtaatggagtggagtggagtggaatggaataaagtgaaatgcagtggaatggaacagagttaaatggagtggaattgagtgtagtggagtggaatggaatcgaatgcagtggaataaaatggtgtggaggggaatggaatggaatggagtggaattgaatggagtggagt

SEQ ID NO: 2042 - DNA, 138 bp, Protomyxzoa rheumatica
ctcaaataaagactacaaaccctaaatcttgcaccaaaatcaaattacgtttcctaagaaaaattacaattttaggccacaagaaacgaaaaattgccagaaatatagatcctttttggtacgtgtgatcctctggcg

SEQ ID NO: 2043 - DNA, 146 bp, Protomyxzoa rheumatica
tccattcccttctacacgtgttgattccattccattcctctctgattgattccattccatttcattccatccattccattccattctattcccctggggttgatcccactccattcaattcgttccattccattcgttccattcca

SEQ ID NO: 2044 - DNA, 143 bp, Protomyxzoa rheumatica
cattccattccattcctctgctctccgttgcactagtttccattccactccactctatccactccattccattcaactcctctccacatcaccccacttccctccattccattgcattccactccactcaactccattcctct

SEQ ID NO: 2045 - DNA, 154 bp, Protomyxzoa rheumatica
tggtttcttttcacaccagcaagggccatgcagagtatagagcaagggaaaataagaggaaaggccagaaccgagagccaagcacactgtccaccacagggacagagcagggagaaaggactcagatggcacaaaagcaaccaagcactggaag

SEQ ID NO: 2046 - DNA, 131 bp, Protomyxzoa rheumatica
catcaaatggaatcaaatggaatgcagtaaagtggagtggagcaaagtggaatggagtggaatggaatgaggtggaatggaaaagaatgtagtggactggagtgtaggggagtggagtggaatggaaagga

SEQ ID NO: 2047 - DNA, 149 bp, Protomyxzoa rheumatica
tggaatggaatcaactcgagtggaatggaatggaatggaagggaattgattggaatggtaactacctagtggaatggaatggattcgaatggtatggaatcaatcccagtggaatggaatgcaatggaatggaattgaatggaatggaa

SEQ ID NO: 2048 - DNA, 149 bp, Protomyxzoa rheumatica
agatgtgtacttgaatctgaaaattaaagaagttaatcatttctcttccattattgtattagctttctatggctatgtaacaatttattacaaacttaacaacataaaaacatgaatttttaaatttcaccatttttatggatcaggtt

SEQ ID NO: 2049 - DNA, 191 bp, Protomyxzoa rheumatica
ttgcgtcgttctctccatggctttttctgttgtcggtttcccactatatgttcccagctcaatcactgatacatagctatgtaacggtgttaagtaatcaaataatgctagctgatgccaacgattttcttcagcatttacatcttttaattccggacgtaaaacaaaaaaaccaatatcgcctttatgac

SEQ ID NO: 2050 - DNA, 152 bp, Protomyxzoa rheumatica
aggaatggaatggaatggaatgggaagaaatggaattgaccagagtgaagtggagtggaatggaatggaatgcaaaggagtggaaaggaagggaatggaatggaatgcaatagaatggagtggaatggaatgcaattgaatggaatggaatg

SEQ ID NO: 2051 - DNA, 132 bp, Protomyxzoa rheumatica
cgtcgatcgatgcctgtccgagctgctgcagttgttggggaggcaactgatcgaacagcagcacgaccttgcaggccggccattgctcgcgcactttggacagatccttcagagcacgttcggtgctttgaa

SEQ ID NO: 2052 - DNA, 164 bp, Protomyxzoa rheumatica
aatgggatggaatggaatggagtttagtgtactggagtggagtggaatggagtggagtagagtgttagggagtggaatggaataggatggaatggaattgaatggaatgcagtggagtggaatggagtggggtgagaaaggaatgggatagagtggagtgcagt

SEQ ID NO: 2053 - DNA, 125 bp, Protomyxzoa rheumatica
tcgattccattccattccattccactccaatttattctattccactccacagccctcctctccattccaatccattccattctaatccattccactccactccattccattccattccattccac

SEQ ID NO: 2054 - DNA, 154 bp, Protomyxzoa rheumatica
tggaatggaatggaatggaatgtattggaatggaatggaaaggagaggagtggaatggattggagtggaatcgaatggagcagaatggaacagaacggaatggaaaagaaggcaatagaatggagtggagtggagtgcattggaatggagttgt

SEQ ID NO: 2055 - DNA, 133 bp, Protomyxzoa rheumatica
tccattccattccatttccttccataccactcaattgcattccattccactccacgccactccactctactgcactcctatccactccattacattccactccactccaatccacttcattcccttctatttc

SEQ ID NO: 2056 - DNA, 158 bp, Protomyxzoa rheumatica
gacaaagtatgtttgcttcctcattcttgcacacacacacacacacacaacacaaaatccaggattatcagaactgtaagaaagcttagagaacatttggattttcacgtggggcaactgagactcagaaatatgaagtgacttgcatacactagagc

SEQ ID NO: 2057 - DNA, 145 bp, Protomyxzoa rheumatica
aatggaatggaatgaaatggaacgcaatggaacagggaggaattgaatgaaatggtatggaatggaatggaatcgaatgaacacgaatggaatggaatggaatgcaaaggaatgcaatggaatcaacccgagtggaatggaatgg

SEQ ID NO: 2058 - DNA, 174 bp, Protomyxzoa rheumatica
tgtttctctctctggcctacagcacatttgatttcatggcatgatttaaaggagtgcctgtttcaccacaaccttcccagcattgtgtgttagcattttttaagtctttgctaacaatctgggaaaagaggtgttacgttgttgacattggtacaggtttgattactcgtgaga

SEQ ID NO: 2059 - DNA, 129 bp, Protomyxzoa rheumatica
caaagatgtgtttgttttgtttcttgtgttggttagcaatcgaatcatgtgtgtgtgttttattttgtttgctaaacggctgaagtaacttgccgttttttcgtttttaattactgtaatagtattcat

SEQ ID NO: 2060 - DNA, 133 bp, Protomyxzoa rheumatica
ccacatacaaatagagattatgagacatttaaaatgctatctgttttgattttatattcccacatcctttccaaacctttgaattttttgtgcttcttaaaaaattttaattccatattacatataacaatgt

SEQ ID NO: 2061 - DNA, 126 bp, Protomyxzoa rheumatica
aataaaattaaaaaaaaataaaagctgcacatacactgaaaaaaaaaagttaaacaaccaaaattagagcagaagcacctagcgaattcttttatgctgccgttcaccaggaaagcaagaaatgca

SEQ ID NO: 2062 - DNA, 195 bp, Protomyxzoa rheumatica
attcggttccattccatttcactccattccattccaatccactccactccactccattccactctactccactccattccactccattcgatgccactccactccattccataccgttttaccccattccattccattcctttacatcgactggattccactttgtaacccaactggagtgcagtagagtagagt

SEQ ID NO: 2063 - DNA, 138 bp, Protomyxzoa rheumatica
tacagtgtataatatatactttttatgctttgatatattttgtacagtatacagtatatactttgtgttcattgatgttttatctagagtacataatatatacttcgggtaatttgatattttatgtacattatataa

SEQ ID NO: 2064 - DNA, 123 bp, Protomyxzoa rheumatica
aagtctgctccaccaagaaccagaggacagctgcaacggcgaagctagcaatcagataggcgacaaagccgacgctaccttgcaggttttcttctccgacgagcaggcgcatgagatgaaatg

SEQ ID NO: 2065 - DNA, 128 bp, Protomyxzoa rheumatica
ccatgccatataaaaatttcgttgcgccgtcagtcgcaatcggtaatcccttttcggcgtcgcctactatggtcttcgcgctacagacccatgacttgccggtcgatgcttctatcaattgtttggtg

SEQ ID NO: 2066 - DNA, 199 bp, Protomyxzoa rheumatica
ctccactccactccactccactccattctactccattccacaccactccacaccactccattccactccatttcactgcactccaatccactctactcaactgccctccactccactcctctccattccattccatttctttctgcatctttccactccactccactctactctgttccattccatcccatttgattcc

SEQ ID NO: 2067 - DNA, 123 bp, Protomyxzoa rheumatica
tggaatggaatggaatggactcgaaaggaatggagtcgaacggaatacaatcgagtggaatgaaatcgaatggaatggactggaatggaattgaaagaatagaatggaatgcagtgtaatgga

SEQ ID NO: 2068 - DNA, 140 bp, Protomyxzoa rheumatica
cattccagtccattccattcgtttccattccattccattctgttccattccattcgattcaattccattcgattatattccatttgactccattccactccattccattcgatacaaatccattccattcaattcctttc

SEQ ID NO: 2069 - DNA, 148 bp, Protomyxzoa rheumatica
atttttttccactccacttaattccattccactctaatcctctccactccgttccattcctttccatttcattccattcctttccatccagttacattccactacacaccattccattccattccactctattccattccactccatt

SEQ ID NO: 2070 - DNA, 127 bp, Protomyxzoa rheumatica
ccattcctctccactccattccattccactgcacgccactcatttccactccactccattccctttcacccaattccattccactccactgcattccaatctactaaattcccctccactccactcc

SEQ ID NO: 2071 - DNA, 154 bp, Protomyxzoa rheumatica
ggattgcaatggaatgtaatggaatggagtaggttgtagtggagtggaatgaaatgcaatggaatagaatggagtagagtggagtggagtggaatgtagtggagtagactagagtggaatggtgtggaatggagtggagtggagttgaatggag

SEQ ID NO: 2072 - DNA, 156 bp, Protomyxzoa rheumatica
gttctattccagtacatccattccggatcattccattctatttgattccatttgattgcattccatattactgcattccattcgattccattctattcatacggattccttttcagatcatttcttttgaggccattctattcgagtccattacat

SEQ ID NO: 2073 - DNA, 177 bp, Protomyxzoa rheumatica
ccattccattccatttcattcgagtctattccattgcatttcattccattcgagtccattccattacattccttttgagtccatctcattgcattgcattccatttctttcgagttcattcaattccatttcattgcattccattccattcgtgtccattccattctattccttttg

SEQ ID NO: 2074 - DNA, 162 bp, Protomyxzoa rheumatica
aatggaatggaatggaatagagtggaatagagtggaatgaagtggagtggagtggagtggaatggaatggaatggcaaggaatggaattgaatggattggagtggagttgcggggagtggagtggagtagtatgcaatggaatggaatggagtgttgtggat

SEQ ID NO: 2075 - DNA, 170 bp, Protomyxzoa rheumatica
agaagaagaagaagaaacccagaaacggccgcaagaagaatcaaagaacacaaaaacaaaaactagggctttctattgaacaaacaaaccctgatccaaaaacaaaaaaaaacaagattttaattaagaagaaaggcaaaaaaaaagaaaggaatatgaaggaggttgaa

SEQ ID NO: 2076 - DNA, 346 bp, Protomyxzoa rheumatica
gaatggaaccgattggaatggactggaatggaatggactcaaatggaatggaccggaaaaaaaggaatccaacggattagaatcgaacacagcgaaatttaatggaatggattggaatggaatcgaatggaatggagttgaatgaaatgcaatagaatggtgtagagttgaatggaatcgaaaggaatacaatggaatggaatggaatggaaaggaaatatatcaaatggaatggaatgtaatgaaatggactctaatggaatggactctaatggtatggactggaatgtaatgtcctggagtggaatggaatcgaatggaatggaaatatggaatggaatggaat

SEQ ID NO: 2077 - DNA, 238 bp, Protomyxzoa rheumatica
tgtggaatggaatggattggaatggataggaatggagtggaatggaatggattggaatggaatggaatagagtggagtgcagtggagtggattggattggaatggagtggagtggagtggaatggattagagtggcgtggaatggactggaattgaatggagtggaaaggagtggaatggagtggattggaatggaatgctgtggaatggaaatgaatggagtggcaaggagtggaat

SEQ ID NO: 2078 - DNA, 289 bp, Protomyxzoa rheumatica
tggaatggaatggaatgcaatagaatggaatggaattaactcgagtggaatggaatggaatggaatttaatggaatgcaatagaatggaatggattaaactcaagtggaatggagtggaatggaattgaaaggaattgaatggaatgccatagaatggaatggcatcaactagagcggaatggaatggaatggaaaggtatgcaatggaatgcaatagaatggaaaggaatcaacttgagtggaatggaatggaatgcatttaatttgaatggacccgaaaagaatgga

SEQ ID NO: 2079 - DNA, 243 bp, Protomyxzoa rheumatica
aaaaaattacacttttctttgattcaaatctaaagaacactttttagtcctaatatgagcacaaaaaccacaccagtcttatgtttatggtgagaactaaatgacataatacaataaaagctcttagaccactagatggtaaagagtaaacagctagttattgtacataatttcatcaccacagccaccatcatcatcattttttaattaaattttaaatttctgtggccacatagtaagtat

SEQ ID NO: 2080 - DNA, 142 bp, Protomyxzoa rheumatica
accaagttattagtacgaatacgtacccgcccctggaagaattcaatgttctggaagttccagacaagagaggcatttactacatcgttgatgtgccagtcagcattaatgcgccgcaccaatccagtgatcaaaaatacta

SEQ ID NO: 2081 - DNA, 159 bp, Protomyxzoa rheumatica
gaggagtggaatggaatagaatggaatggaatggactctaatggaatggactggaatgaaatggacaagaatggaatagagtcgaaaggaacggaaagaaatggaatggaattgaagggagtggaaagcaatggaatgtaatggaatggagtggagtgg

SEQ ID NO: 2082 - DNA, 191 bp, Protomyxzoa rheumatica
gaatggaatagaatggaatggaatgcaatggaatcgaatgtgatggaatgtattggaatggactcgaatggaatggattgcaaaggacccaaatggaatggaatggaatggtctccaatggaatgcaacggaatgtattggaattgaatgcaatggaatcgaatgggatggaatgtattggaatggactcg

SEQ ID NO: 2083 - DNA, 143 bp, Protomyxzoa rheumatica
ttccattccattccattccattccattccattctctttcattccactgtggttgattccagtctattccattccaatccattccattccagttgattctatttctttccagttgattccattccattccattccattccattc

SEQ ID NO: 2084 - DNA, 141 bp, Protomyxzoa rheumatica
cgctctggatcgggtgtgtaatcgccctccgcgtggcgaagcagcaccctgctcgcatgctccttagccttgacgtacgccttgatgaaggtttcgaacctgtcaccgaccagcttcaggcgccggctggccaggaactcg

SEQ ID NO: 2085 - DNA, 126 bp, Protomyxzoa rheumatica
tatggaagtgtgtccgtggtgtgtgtggaggtatatgtgtgtgtgctgtgcatatgtgtatgtctgtggtgtgtatgtgtgtgtggtgtgcttatgtgtatgtgtatggtgtgtgtgtggtgtgtg

SEQ ID NO: 2086 - DNA, 162 bp, Protomyxzoa rheumatica
ggaataggtgaagctccagttgtgtctctctcaggcttacttctgctcacgaaaaagtcggctggcacggattctgcaacttggagcggacgtgtggtccatgttgctgaaggggaatgggagggcgtggggcgctctctgggcgagcaggtagggaggtag

SEQ ID NO: 2087 - DNA, 128 bp, Protomyxzoa rheumatica
ctgaaatgccaggcgcgcaaagcgctgccacaacacctgtaatcgcgattacttcagtcgctccgaccctattcaaaaaatcaagcattgaggttcgatttctaaaggagaaaaatcaagcaggatcc

SEQ ID NO: 2088 - DNA, 150 bp, Protomyxzoa rheumatica
atctttccattacactccattccattccattcttttccattccattcaattcctttccattcaattccactccatgctttccactccattcgacttatttacattcgagtccattccattccattctgttccattccattcaatccgatt

SEQ ID NO: 2089 - DNA, 143 bp, Protomyxzoa rheumatica
actttagattcagcatgttggaaaaactgtttttggaggatctgtgaaggaagatttgggagcccactctggcttaagaaaaaaaaaaaaaacagaatatccccagattaaaaccggaaagaggatttctgtgaaactgcttt

SEQ ID NO: 2090 - DNA, 297 bp, Protomyxzoa rheumatica
atctaatggaatgccatcgaatggaagggactggaatgtaatggattcgaatggattggaatggaatggaatggtatagaaaggaatggaatgaaatggaatgctatggaatagtatggaatggaatggaatggaattgattggaacggactcgaatggaatggactcaaatggaatggatatgaatggaatggactcgaatgttctgcaatgcaatgtactcgaaaggaatggtctccaatggaatggactcatatggaatgcaattgaatggaatggaattcaatggaatgaaat

SEQ ID NO: 2091 - DNA, 163 bp, Protomyxzoa rheumatica
taatggcatggaatggaatggaatggaatgtaatgggatgcaatggaatggaatggaattgagtggagtggattggaatagaaaggaatggaatggagtggatgaacaggaatggaatggaatgaaatttagtgaaatatagaataatggagtggagtggaat

SEQ ID NO: 2092 - DNA, 154 bp, Protomyxzoa rheumatica
ctacgcaactaggaaggattttcttcccaattacgaaggtctttcttcgcatttttctaaactaatcgttcgcaattggctcgcaatcacaacactgtaaaaaaagttacttgtatctcaagacctggtcttggatcttatgaagaacaccaat

SEQ ID NO: 2093 - DNA, 208 bp, Protomyxzoa rheumatica
tgtagtggaatggaggacaatggagtagaatggagtggaatgcaatggaacgaaatggaatggcatttaatggaggggaatggagtggaatggagaggagtggaaagaaatggaaaggaatggaagggaatggagtggagtggagaggagtggaattgagtggagtggattgcagtgcagtgaaatggaatggaatgcagtggagtgg

SEQ ID NO: 2094 - DNA, 127 bp, Protomyxzoa rheumatica
ccattccattcaattccattccattccgttccattccacttcattccagtccacccttctacattccaatccactccactccattccattgaattccattgtattccactccattccactccactcc

SEQ ID NO: 2095 - DNA, 213 bp, Protomyxzoa rheumatica
tccattctactgcattcaattccattcctttatttcgactggtacttactctgtgaaccctactggagttcagtggcacaatcttaggtctcatttcatttccccaatccattccattcctttctgttccatttcattccattccattctattccaatctactccattacattccagtcctttatttcaactggatctcactctgtcatcaag

SEQ ID NO: 2096 - DNA, 132 bp, Protomyxzoa rheumatica
atggggctgcgtcaaggtcacggaacgacggaaaccctggctggaggttttctccgtggtgccttgttcatgtatctggcctctccactgacatggccttggaggaccttctgagcccagtctgctgggagc

SEQ ID NO: 2097 - DNA, 146 bp, Protomyxzoa rheumatica
tgccccaggtcccattctactagatgagtatttgctttctgggtctccttgattagagtatacaatggtctgggcatcttgctgtatccagagatccattgttggaaaaagccagtggttccaaggaacccccacagctgttttaa

SEQ ID NO: 2098 - DNA, 230 bp, Protomyxzoa rheumatica
caaataaaaaataaaataaaaaatagtaaaaataaaaaatacaaataaaaataatgcaatttaaaaaaaaaactatcgttcaagtatctgcccccggttttcttcatctctgaatggctgtttttgcagaactggcagaaactcagaacgaacgccattcattcttaggacgcagagttaaattctgcaacagccacagcatcctaacgcctggttgcctgcacccgcca

SEQ ID NO: 2099 - DNA, 198 bp, Protomyxzoa rheumatica
ccattccatttcattccattcctcaagaatctattcccttccattccactcctctccatttcactcctttgctttctgctccgcaccaatcaattccactccattccacttcattccattccattcctttcgggtccattccactccacttcactccagtccatagcattctattcctttccattccattccattcca

SEQ ID NO: 2100 - DNA, 212 bp, Protomyxzoa rheumatica
gctcgtacgagagtcaaatagctcgtctaacgaaggaaatgacggctacaagagatcgatggcaggatgccaaccatctcgtgcttagcgggcaagggacggcgcagaatatttcagttatcgatccatcgcccttcctcaagaattttggacttagagcgccggactacgttgtcgatcgcaaattaatacttgtcctcaccccgtttgct

SEQ ID NO: 2101 - DNA, 155 bp, Protomyxzoa rheumatica
catattgtcaaaactgcgccacaatttttacagcctcatgttttattagcaattgaacatgggtatgatcagggcgaacaggttaggggcgtgtttttgtcaaatggctttgacgaggtaatcaccgtcaaagactatgggaacaatgaacgagt

SEQ ID NO: 2102 - DNA, 249 bp, Protomyxzoa rheumatica
tccattccattccattccattctattccattccagtccatatcactccactccattccattccattccattcctttcgagtctattcaattcaattgctttccattggagtccattccattcttttctgttccattctatttcattcgtgttcattccattgcattccgttccattcgaggccatttcattccattacattccgttccattctgttctgttccgttccgttccattccattccattcca

SEQ ID NO: 2103 - DNA, 148 bp, Protomyxzoa rheumatica
ggactcgaacagaataaactggaatggaatggaatggtctccaatggactggacacgaatggaatgggatgggctcgaatggaatggactcggatggaatagactcaaacggaattgaaatgaatggaatggaatcaaaagcaatgga

SEQ ID NO: 2104 - DNA, 215 bp, Protomyxzoa rheumatica
gaatggagtggagtggaatggaatggagtggaatcaaatggagtggagtggaatggagtggagtggaatagagtggaatggagtggaatggagtgaaatggaatgcagtggactggaaggaatggagtggaatggagtggagtggagtcgaatggagtggagtgctctgagtgtaatggagtggagtggaatggaatggagtggaatggaatgga

SEQ ID NO: 2105 - DNA, 179 bp, Protomyxzoa rheumatica
tccattccattccattccattccattcaattctactgcattccactcgtgttgattcaatttcattacaataaattccactccattctattccattccataccattccattctagttgattcctttccattccattccgttgcattccattccattgcattccattcctttccattaaa

SEQ ID NO: 2106 - DNA, 328 bp, Protomyxzoa rheumatica
gaatgggaaggaatagaattgaattcagtggaggggagtggagtggaatggaatgcactggaatggaaagttatggaatcgaaatgaatacaacaagacagaatggaatggaaaggaaacaaatggaatggaattgaatggaatggactcgaatggaatagaatcgaatggaatggaaaggaaaggaatggaaaacaatggaatggaatggaatggaatggtatcaacccgagtggaatggaatggaataaacaccagtggaaaggaatggaatggaattgaatggattggaatggaatggtatggaatgaaatggaatggaatggaa

SEQ ID NO: 2107 - DNA, 139 bp, Protomyxzoa rheumatica
gatatctatgaatcaaaagtgttgcagaagtagctatgctgccaaattataaatgcccatacaaacggagaagttcatgtcttgttggtaacctgtgggctgacaaaagacctatggtctactgacatttaccatgtat

SEQ ID NO: 2108 - DNA, 142 bp, Protomyxzoa rheumatica
attcaatcctatatttgaggaaattttccaaagtgtcaatcgtgtttatattaattttcctctttcagactaaagaaaagtccctgaaatttaggttgatttaggcactataacataagctttccggatagaacttgtttgg

SEQ ID NO: 2109 - DNA, 181 bp, Protomyxzoa rheumatica
ctgcaccagggtccattttgttgcgtcgcggcgaacccgctcttcgggcgtgtacagcatcctaaggccttgccgaggctccgaaatggcacttccggcaccgaccgaaccatgcggcgctgcagcagatgttttgacgctatcgatgtaaagaatgtttgacacatcctcattgcggtga

SEQ ID NO: 2110 - DNA, 160 bp, Protomyxzoa rheumatica
tggcgtggaatggagtagtgtggaatggaatggagtggaatggaaaggaatggaatttagtggattcaaaaggagtagagtggagtggagtggagtggggtggaacggaatggaaaagaatacaaaggaatggaatggaatggaatggaatggaatggaa

SEQ ID NO: 2111 - DNA, 127 bp, Protomyxzoa rheumatica
gcctcaaatcactacaaatgtccacttcctgataatacaaaaagactgcttcaaaacctttctctcaaaaggaagtttgaattctgtgagttgaaatcacacttcacgaagcagtttctgagaatgc

SEQ ID NO: 2112 - DNA, 186 bp, Protomyxzoa rheumatica
ctcgaatggaatggactggaatggaatagactagaatggaacggaattgaatataatcgaatgaaatgaaatgaaatgaaacgaaatgggatcgaatggaatggactcaattagaatgaaccagaatggcatagacacgaatggaatgtaatcgaatggagtggaatcaaattaaatggaatggaa

SEQ ID NO: 2113 - DNA, 122 bp, Protomyxzoa rheumatica
acaaccaagacaccacacacactgcacacacacctcacacacactgcacacaccacaccatgttcacacgtacacacacaccacacactgcacatgctacccacacatcaaacacacactac

SEQ ID NO: 2114 - DNA, 179 bp, Protomyxzoa rheumatica
cattccattggaatccattgagttccattcctttccattccattagatttcattccattccattgccttccctttgattccattccattccatttgattctgtttgattccattgcattcaattccatatcattccattcgattccattccattcaattccattccaatcgattgcatt

SEQ ID NO: 2115 - DNA, 132 bp, Protomyxzoa rheumatica
accctaaacctacaacttaccataatcgataacctaatcctaacccttaccctaaatactaatcctaatgcctaaccctaatcctaaccttgaaaccctaaccccaaacaaagccataatccttaaatgaaa

SEQ ID NO: 2116 - DNA, 126 bp, Protomyxzoa rheumatica
aagaggagatagaagccggaagaggagagaaagaggaggaggaggggttaaggaagggattacggaggaaacggtgaggcttattgttgttgttgttgttagagagcttgttgggtttagcattga

SEQ ID NO: 2117 - DNA, 172 bp, Protomyxzoa rheumatica
aatggaatggactccaaaagaatggaatggactggacccgaattgaatggagaaaatggagtgcaatggaatagaattgaatggagaggaatggaatagaatgaaatgaaatggactcaaaagaaatggaatggtattgaatggaatggaatggaaaggattggaatggaat

SEQ ID NO: 2118 - DNA, 303 bp, Protomyxzoa rheumatica
tcgaatggaaaggagatgagtggaatggagtggagggtaatggagtggaggggagtggagaggaatggagtggattggagtcgagtggagtggaatggagtggaatggaatggaaaggaatggaatggaatgggttggaatggagtgggttggagaggaatggattggagtggagtggaatgcaatgcaatggaacaaaatggaatgaaatggaaggaaacagagtagagtggagtggagtttagtggagttgacggaacgggatcggagttcagtggaatggataggaatgcaattgaatgg

SEQ ID NO: 2119 - DNA, 138 bp, Protomyxzoa rheumatica
tggaatggaatggaatgtagtcaaattgcatgaaacggaggagtggagtggagtagaattgagttgagtggagtggactgcaatggaatggaacggaatgtaatgtagtggaatggaatgcaatggaatggagtggag

SEQ ID NO: 2120 - DNA, 144 bp, Protomyxzoa rheumatica
tatctatgtctgtgtgtctttgaatgtgcccatatatgggagtttgtgtgtgtgtcttggtgactatgtaagactgcatgtgtgaatgtgagaatgtgtgagtctgtgtattaagtgtgtgtatgtatgtgtgtgagtttttat

SEQ ID NO: 2121 - DNA, 133 bp, Protomyxzoa rheumatica
cacctttccactccactgcattgcattccattccattccacttaacttcattccactacattccattacaatccagtcccctccattgcattccattcaactccattccattctattccataccattcctttc

SEQ ID NO: 2122 - DNA, 152 bp, Protomyxzoa rheumatica
catggtaggtatatttaaatttttatatatttgttttttgtgtagttttgtaatttttaatttcttgcatatattttcaattaattgtgtagttttatttgttagtatatatatgctatgtttttttttatcaaactgttctcgtagctcag

SEQ ID NO: 2123 - DNA, 153 bp, Protomyxzoa rheumatica
tcctttcgattcaattcccttcaaatcctccgacttcaactgcattcaattcgagaccatgccattccatttttttctctttcattccattccattccatcccatttcagttcattccattccattcgagttcatttcattcaattatattac

SEQ ID NO: 2124 - DNA, 124 bp, Protomyxzoa rheumatica
cattctgttccattcagttccattccattccgttccgtgccactccacaccattgctttccatttcactccattccactccactcctgttcactacattccactccattccactccactccatt

SEQ ID NO: 2125 - DNA, 126 bp, Protomyxzoa rheumatica
tgaaactttttttaaaaatcactaagttttttttttgtgcgaaaaaatcactaagttaaatttgattattttcacaatacaaatatattttagaattattatttcttttcaccatttttttccact

SEQ ID NO: 2126 - DNA, 129 bp, Protomyxzoa rheumatica
ccccacggtttcattccattccataccattccactccattccattccactccactcaggttggttcccttccattcaattgcattcccttcccttccattcaaaagcattcctttccattccattctat

SEQ ID NO: 2127 - DNA, 129 bp, Protomyxzoa rheumatica
tccattctattccactccactccattacactccattacacaccattccactccattcctttccattactttgcactccattccactccactccactccagtccaatacattctattccattccaatcca

SEQ ID NO: 2128 - DNA, 158 bp, Protomyxzoa rheumatica
gatggaatggattatagtggaatggaatggatttgagtggaatgtaatggaatggagttgaatggaattgagtgccgtggagtggagtggagttgaatggaggagagtggagtgaagtggagtataatggagtggagttgagtggaatgcattggaat

SEQ ID NO: 2129 - DNA, 132 bp, Protomyxzoa rheumatica
tgaaatcatcaaatggaatagaatggagttatcatcgaacggaatcgaatgtaatctttgacttgcatcgaatggaatcattgattgaaatagaagggaatcatcatcggatggaaacgaatagaatcatcg

SEQ ID NO: 2130 - DNA, 149 bp, Protomyxzoa rheumatica
tgtgagccaccatgcccggccactctgatattattaattagctgattgattcaacaaacatttattgggcccctactctgtgccttgttcaggcagaagaagagaacaacatctccactctcatagcactagaaaaagacaaaagaacc

SEQ ID NO: 2131 - DNA, 132 bp, Protomyxzoa rheumatica
atcagcccgactcagatcgaaaacgaattgaggcacagtccgttcatttccgaggcggcggtgatcggcgaggggcgaaaatatctcaccgcgctgatcgaagtggatgccaccgccacgatggagtgggcg

SEQ ID NO: 2132 - DNA, 127 bp, Protomyxzoa rheumatica
aattgactcaaatggaatgggcttcaatggaacagactcgaaggaaatggaattcaatggactcaaaagaaatagagtggatgggaatggaaactaatggaatggaatggacacgaatggaatggaa

SEQ ID NO: 2133 - DNA, 148 bp, Protomyxzoa rheumatica
aagtaatatgcagttactaaccaagaagagaagaatccagacctagttcaccatctggtcttcttttcaccataccaataatatctgactgtaggcaagatgagagggcaatgagtaagcactaatattatttcagggccttataacc

SEQ ID NO: 2134 - DNA, 132 bp, Protomyxzoa rheumatica
acgagtgtattgtgtatgtgtgtagtgtatgtgtgtacatgtgtggtgtattgtgagtgtacattagttttgtgtgtacatgtgttgtgtgtgtacatgagtgttattttatgtgagtgtacagtgtgtgag

SEQ ID NO: 2135 - DNA, 148 bp, Protomyxzoa rheumatica
gtggaatggaaaggagtggagtggaatggaatggaatggagaggaatggaatggaatgtagtggagtggaatggaatggaaaggaatgcagagaaatggaatggagtgaaatgaaatggagtggattggagtggactggagtggaatg

SEQ ID NO: 2136 - DNA, 124 bp, Protomyxzoa rheumatica
atctcacaataaaaattaatatcatattatcataaactaaaatattaataaaattaatttttattcaaaattataaaattaatatcatattatcaaaaaaaaaatagttaattgagatggtaag

SEQ ID NO: 2137 - DNA, 131 bp, Protomyxzoa rheumatica
ctcaagaacatggcgctgatcagtacatccctcaacggcgtgatgtggtcgttgcagctcgaactgctggccattcccgtgatctacgtgatgtatctcctgttgctgcgggggacacgccttgcggtcat

SEQ ID NO: 2138 - DNA, 128 bp, Protomyxzoa rheumatica
atggaatggagtaggaaggattcatatggaatataatgtaattgaatggactctaaggaaaagaatgtaatggaaagcaatggacttgaatggaatggaatataatagaatgaaatggaatggaatgg

SEQ ID NO: 2139 - DNA, 189 bp, Protomyxzoa rheumatica
attccactccattccattcgaatccattccactgcattacattccagtccattccatccagttccattgcattccattccattttactcgagtccattgcattccattcgaatccattccattccatttcattcgagtccattcttttcatttccattctactcatttcaagtcctttccattccattc

SEQ ID NO: 2140 - DNA, 217 bp, Protomyxzoa rheumatica
ccattccattcctctccattccactccattccactccactccaattccactccattccactccactccactccactaaactccattccattccactccatgtcagtccattccactctactgcattgcactacactccattccattcctctcaattccattcctttccactccactccattccactccactccactccaatcctctccattccactc

SEQ ID NO: 2141 - DNA, 132 bp, Protomyxzoa rheumatica
ctattccattccattccattccattccactcaatgccactccattgcactccactctactacaatccactccactccactccgttcccctccaatcgacaccactccactccattcaattccattccattca

SEQ ID NO: 2142 - DNA, 127 bp, Protomyxzoa rheumatica
tccactccattccactcctcttcactccattcctccctctccactccattccactgtaatcgactccattccactccactccattctatttcattccactccactcaattcaactccactctactac

SEQ ID NO: 2143 - DNA, 152 bp, Protomyxzoa rheumatica
caacccgattggaatggaatggaatggaatggaattgtgtggaatgtaatggaatggaatggagtataaaggaattgaatagaatcaaccagaatgtaatggaatttaatggaacagaacggaatggagtggaatggaatggaatggaatgg

SEQ ID NO: 2144 - DNA, 129 bp, Protomyxzoa rheumatica
tgggaaagaatggaattgaacggattgaactagattggagtggactggaatttaatgaaatgaaatggaatggagtgtagtggaataaaatggagtgaagtggagtgtagtggaatggaatggaatgga

SEQ ID NO: 2145 - DNA, 138 bp, Protomyxzoa rheumatica
tcgattccattccattcagttacattccattcgattccagtccatgccattcgataacattccataaaattccattccattcgattccattccattcagttacattacattcggtgtcattccatttgattccattcc

SEQ ID NO: 2146 - DNA, 159 bp, Protomyxzoa rheumatica
tcatgtccattccattccattccactccatttgagtaaatttcattccattaacttccattccattcgagttcattccatcccgttacattccactccattcgactccattccatttcattccattcattatgagtccattccttcccattccattcca

SEQ ID NO: 2147 - DNA, 129 bp, Protomyxzoa rheumatica
tggaatagaatggaatgtactggaatggaatggagaggagtggagtggactcgaatggaacggagttgaatggaatcaaatggaatggattggaaatgaatagactcgaatggaatggaatgcaccaga

SEQ ID NO: 2148 - DNA, 131 bp, Protomyxzoa rheumatica
ctcatccaatggagtcaaatggaatcatagaatggtatggaatgccatcatcatcaaatgaaatcaaatggaatcatcatcgaatgcagtccaatggaatcgtcaatgaatggaatcgaatggaatcatcg

SEQ ID NO: 2149 - DNA, 139 bp, Protomyxzoa rheumatica
caatggtgagcagccgtgatgtgattggaggctcttcctcctagctgggcagatgctactgtttctcctgaggtcacgtgccctttctgaccattgagggtttgatgatgtgctctatatctgatgattgaagtttcaa

SEQ ID NO: 2150 - DNA, 130 bp, Protomyxzoa rheumatica
tggaatggaatggactcgaatggaaaggaatcgattggaatggaatggaatcgaatagaaatgaatgaaatagaaaggaatcgaatggtatcttatggaatgcaatcgaaaggaatggaatcgaatggaa

SEQ ID NO: 2151 - DNA, 131 bp, Protomyxzoa rheumatica
agtggagtggcgtggagtggaacgaaattgaacggaatggaacagaacagaatggagtgcaatggaatgcaaaggaatggtgtaaataaatttgtgctgagattgtgccactatgctacagcctgtgtgac

SEQ ID NO: 2152 - DNA, 131 bp, Protomyxzoa rheumatica
cccaccgctaaactctttagtaaaatatattatcacatcatttcttttatgatacattaaaatctgtactatattaaaacattagttattttgttaccttttttaaaaaaagtcttgcttcatttcacagt

SEQ ID NO: 2153 - DNA, 187 bp, Protomyxzoa rheumatica
ccattccattccattccactccactccattccattccactgcattccactcccctccaccccattgcattaccccctctccatttcaattctctccatttcaatacagtccatgccattccattcaactccactccattccatgctactccactaaattccattccattttactccactcaaatcca

SEQ ID NO: 2154 - DNA, 206 bp, Protomyxzoa rheumatica
cattcaatttgattccattccttttgattccattccattcgagtccatgccatttcattccattccattccattccgttcctttcgattccattccattctattccattgccttccattccattccattcgtgtccattccaatcctgtgcattccattcgattccattctattcgattccattacattccattcgattgcattcc

SEQ ID NO: 2155 - DNA, 144 bp, Protomyxzoa rheumatica
cgaaagcagaggaatggaatggactcaaatagaatggaatggacatgaatggaacagaatgaagtggaatgaattggaatgaaatacaatggaatttattggaatggactctaatggaattgaatggaatggactctaatggaa

SEQ ID NO: 2156 - DNA, 173 bp, Protomyxzoa rheumatica
aaagaaagagagagacagacagagaaagagacagacagagacagacagaaacagcaagagagagagacagagagagagagcgagagagacagagggagagaaacagacagggagagagagagagacagagagagagagacagacagagaggcagagaaagagagagagaaaga

SEQ ID NO: 2157 - DNA, 125 bp, Protomyxzoa rheumatica
tccactccattccattctattcgagtccattccattccaaatacattccattacatttgtgtccattccattcaattccattccattcttgtccattccattccattccattccaaatcattcca

SEQ ID NO: 2158 - DNA, 171 bp, Protomyxzoa rheumatica
tccttccacttcattgcactccattccactccactcaattccactccaattcactccactccactccactaaagtccactccactccgttgcattccattcccttccgttccattcagttctgttccatttcactccattccattccactcctctcctttccactccactc

SEQ ID NO: 2159 - DNA, 188 bp, Protomyxzoa rheumatica
atcatcaccatcaccaccatcattaccatcaccatcatcttcaccatcatcactaccaccatcatcatcaccatcaccataatcaccatcatcaccaccatcatcacaatcaacaccattatcaccatcaccattgtcactattgtcaacccaatgatgatcttcttcattatcttcacaatcatcca

SEQ ID NO: 2160 - DNA, 135 bp, Protomyxzoa rheumatica
catcattgatctgcgaccggattcgccgaactaccggcgttatgccggatttgacctgtcggagggcaaccattgccagctctatatacccaagggctttgcgcacggattccaaaccctgagcgatgatgccgt

SEQ ID NO: 2161 - DNA, 215 bp, Protomyxzoa rheumatica
attcctccccattccattccagtgtattccactccattccactccaccaaattccattcaattccattcgtttccattctactctattcaattccattccattcgaggccattccattccattcggtgtcaatccactcctgtccattccactccactcccttccactccactctgttcagtgccattccttccctttccattccattccactcc

SEQ ID NO: 2162 - DNA, 149 bp, Protomyxzoa rheumatica
cggcggccactgccggcacttctacagcgtagccgagcactcggttcacgtggcgcgcgcggcgccggatcatcttaagcggttcgcgctgctacatgacgcgacggaggcctatgctgtcgatatcccgcgaccgctgaagctttccc

SEQ ID NO: 2163 - DNA, 141 bp, Protomyxzoa rheumatica
ccatgtctgtctgtctgtgtatgtttctgcgtgtgtgtctgtttctgtgtgtgtgtccctttgtgtctgtgtgtgtctccatgggtgtctgtgtgtctgtgtgtgtgtgtgtccatgtgtgtctgtgtatgtgtccgtgtg

SEQ ID NO: 2164 - DNA, 144 bp, Protomyxzoa rheumatica
cagtggaggggagtgaatttgaatggaaaagagtggaatgtggtggagtgaactggattggaatggaatgtagtggagttgaatggaatggattggaatgcaatggaaagaaatggaatggaatggaatgaaaaggaatggaat

SEQ ID NO: 2165 - DNA, 136 bp, Protomyxzoa rheumatica
acagtgtttctcaaactgatatctcagagtgaccaacagaatggccatttaaagtgcttgtaaaaaattttatggactcaggttttgtgggaatgggttctaggaatgtgaaataatattagggaaccagtttatt

SEQ ID NO: 2166 - DNA, 126 bp, Protomyxzoa rheumatica
aatccattccattcaatttcaccacattccattcccttccactccatttcactccactactgtatactccattctacaccactccactccactaccctccattccactctactattcaccactcca

SEQ ID NO: 2167 - DNA, 124 bp, Protomyxzoa rheumatica
tcctggtggccggtcaggttcggcatgccgccagaagtcgtgttcgtcgaaatcgaaggtcaggcgtcctgacatcacagtttggaacgccgctccgccggataacccgataggggtagccggc

SEQ ID NO: 2168 - DNA, 221 bp, Protomyxzoa rheumatica
cattccattccaattcattcctttgcaatccactccattccattccagtccactccatttcattccactccattccactccactacattccgttccattccaatccactccaatctattccactcagttgccttccactcgactacattccatacaattccatcccactcctttccattcctctccacttcattccactccacagcactacattccaatcc

SEQ ID NO: 2169 - DNA, 163 bp, Protomyxzoa rheumatica
gattccattccattctattcaattccatttgatttagttccattcgatggcattccatttcattccattccattcgtgtctattccctttgagtccattccattccggtccattccattcaggtctattccattccattccattccattcctttccattccat

SEQ ID NO: 2170 - DNA, 126 bp, Protomyxzoa rheumatica
tgtatatacgtatatacacatatatgtatatacacacacatatacacacatatatatgtgtatatatgtatatacacatatatatgtgtacatatatgtgtgtatatgtgtgtatatatacatata

SEQ ID NO: 2171 - DNA, 160 bp, Protomyxzoa rheumatica
tggaagcaaaatcaagaaatctcaaccgtctgaaaaaatcgtgcaggcatttcgcaacaagcgaactcgcgatcttctttcagacgaggagttcttttctatcaaagaatttcttggagcacattccaagctgttcgatgagctccccaaggaaaccctg

SEQ ID NO: 2172 - DNA, 189 bp, Protomyxzoa rheumatica
tgcagtggcacaaattcagctcacatttcatttcaccattctattccattctattccattctattccattgcattccattcctttgcattccattccattgcattccattccattctattccactcgactccattccactctctgccactgaagtctactccactccactgcactcgatggcattccat

SEQ ID NO: 2173 - DNA, 176 bp, Protomyxzoa rheumatica
gaatggaatcaacttgaatggaatggaatggaatggaatgcaatgcatttgaattgagtagacccaaaaatatggaatggaatggaatgcaatggaaacgaatggaatggatttgaatggaatggacctgaaaagaatggaatgtaacggaatggaatgaagtgacctcgaatgga

SEQ ID NO: 2174 - DNA, 132 bp, Protomyxzoa rheumatica
cacactacatacccacagaccacacacacctcacacactatatacccacagaccatacacacctcacacacacagaccacacacgcctcacacacactacatacccacagaccacacacacctcacacacta

SEQ ID NO: 2175 - DNA, 153 bp, Protomyxzoa rheumatica
agtggaatggaatggaatacaaaagaatggaattgaatggagtggtgtggagtggagtggattggaatgggatgcagtggattgggatggaatggaatggagtggattggaatgaagcgcagtgttttggaaaagaatggtatggaatggaat

SEQ ID NO: 2176 - DNA, 207 bp, Protomyxzoa rheumatica
aatggaatggagtggaatgggctcgaatgtattggaatggaattgaatggactcgaatggaatggaaagaaatggaaaggaatgaactcgaatggaacggaacataaaggagtgaaatggactcgaatttaatggaatggaaaggaatggacttgaatggaatggaatggaatggaatcgaatggaatgcatttgaattgaatggac

SEQ ID NO: 2177 - DNA, 161 bp, Protomyxzoa rheumatica
aatggagtagaatggaatggaatggagtggagtagaatggaatggtgtggaatagagtgtaatggagtggaatggaatggagaggagtggaatggattggaaaggtgtggaatggaatggtatggaagggagtggaatggaatggaatggagtagaatgga

SEQ ID NO: 2178 - DNA, 123 bp, Protomyxzoa rheumatica
ctcctttccattctgttccattcccatccgttccgttacattccacattactgaattccattccactccactgctctcctatccaattaactccattccactccattccaccccactccactc

SEQ ID NO: 2179 - DNA, 126 bp, Protomyxzoa rheumatica
tgcaacacacaacacacaactacacacaatacacaactcacaacatacaccacacaactcaccacacacacaccacacaacacacacaccacacacaacacacacaacaaacataacacatacacc

SEQ ID NO: 2180 - DNA, 138 bp, Protomyxzoa rheumatica
tctctcttcttgtgttttttttttcttatcttctttctcataaaaagtctctctcctctctcttccttgcgtcttctctttccccaatctctctcaggtttctctttcctctctcaccagaagggcaaaaaaattccc

SEQ ID NO: 2181 - DNA, 158 bp, Protomyxzoa rheumatica
ccattccactcaattccactccatactactccatcccactcaaatccattgtattctatgcgattcctttccaatccactccattccaattcactccattccattcctctccactcctctccattccacagaattccattctattcctctcctctcca

SEQ ID NO: 2182 - DNA, 136 bp, Protomyxzoa rheumatica
ttccatttggtatcattccattgcactctgatccattctctttctttcgattaaattcaattccattctattcgattacattccattcgattccattgcattcaactccattccaatcgagtccattccattccat

SEQ ID NO: 2183 - DNA, 166 bp, Protomyxzoa rheumatica
cgagattgagcgacaggctctcgcaagagaagaaagctgttccctgcatcagcctgccgcccgtttcgtcaccaccacggagccggcttcaacttcgactcggcgatctcgttcggccagacgatcttgtgggcgccgtcctgcacctgcacgaacagctggctca

SEQ ID NO: 2184 - DNA, 159 bp, Protomyxzoa rheumatica
ttccattccattcctttgcattccatcacattccattcccttccactcgggttgattccattttattccattccattcaattcctttcctttccattccactctattccaatgtgttctattccattgcactcggattgattaaattcaattctgttcc

SEQ ID NO: 2185 - DNA, 151 bp, Protomyxzoa rheumatica
cccaggcccagcccaggtttatttggtgataagatttggttttgttttttcccaagccccaagggcgtgtgccacccagagccctggcctggattatctgttgctcagtggcagcctggagctgtgcctcgcagtggggctgtgcggggca

SEQ ID NO: 2186 - DNA, 161 bp, Protomyxzoa rheumatica
atgggaagaaatggaattaaacggaggggaatggagtggagggcattagaaagaaatggaatgtcgtggaatggggtggactggagtggactggagtggaatccaatggaattgaaaagattgtagtggagtgtagtggagaggattggagtggagttgaa

SEQ ID NO: 2187 - DNA, 131 bp, Protomyxzoa rheumatica
tggggttatagcactgaaaagacagatgtgttctgacctcacagtctctcaaggggatagtgataccgaatgtgcaagtcctttctatcacagctttgagtcctcatagactttttgaggaaagtttgggg

SEQ ID NO: 2188 - DNA, 154 bp, Protomyxzoa rheumatica
aatggaatggtatggaatggtctcgagtggaatggactccagtggaatggacttgaatggaacggagtggaatagaatggaaaggaatggaaggaatcatattgaatggaatggaaaggattggattcgaaaggaatggactcgaatggaatgg

SEQ ID NO: 2189 - DNA, 159 bp, Protomyxzoa rheumatica
gaatggagtggagtggaatgtattggagtggattggagtgtaatggagtggagtggaatggaatggaatggagtgaagtgtaggaaagtgaagtggagtggaatggagtggattttagtagagtggagtggagttgagctgaatggaatggaatggagt

SEQ ID NO: 2190 - DNA, 135 bp, Protomyxzoa rheumatica
acacaatcacacagcacacactcataccacatacacactatatacataccattcacacataccacatacatatgacacacacacacaccatagcacacacaacatctatgcacacctgcaagggctgtgggcttg

SEQ ID NO: 2191 - DNA, 232 bp, Protomyxzoa rheumatica
atgctgaaccccgcgttgggcgagaactgcgtgaaccaccatgatggtccggccattgccgtccaggaaaggatggccgtatgcgagatatcccatcacctcgccgggcttcgccgccatgaaggcacgatcctgtccgtggctcaatgcgtagtcgactgcgggtcgaatgtcgtgagggtgagcgaacagaacgccccccttgctcaccgcaatgtcgggcgctgtgttg

SEQ ID NO: 2192 - DNA, 167 bp, Protomyxzoa rheumatica
gagtggagtggaatggaatgctatggagtggaatttactggaaaggagtggaattaactggagtggactggaattgaatggagtggaagggaatggaatgaagaggaatggagtgaagtggagtggagaggaatagagtggagtggagtggagtggaatggtggagt

SEQ ID NO: 2193 - DNA, 154 bp, Protomyxzoa rheumatica
gcctccattgccgcgacgcccgccatttcgagcatcagcagatcgggctcggcgcatgtgatcagcaccagatttttaatctggttaacccaatatggcgttgcaaagggtatgttggggaacgggcttggcaccggcacaagtggcgagacgt

SEQ ID NO: 2194 - DNA, 147 bp, Protomyxzoa rheumatica
aatctcagtgaaaagtaactgaaatcaatggcttagaattctgtcttatcagagtttaacaaagaacagtgaatttggggggaaatgacagggcaaaggaaggtggttttaggcttcagaaggtgggaggctgtgggaaggtaacta

SEQ ID NO: 2195 - DNA, 133 bp, Protomyxzoa rheumatica
tgtaatggattgcaatgtaactgactcaaatggaatggaatagaatggaatgtaataaaatggaatggaatacaatggaatggaataagatggaatggaatgaaatcgaatggagtcgaatggaatagagtgc

SEQ ID NO: 2196 - DNA, 165 bp, Protomyxzoa rheumatica
tccattccattccattccattgcactccactccactccactccatcccactccaatccattcaactccattccactctactccaatccactccactcatatccaatccactccactccactccattccaatccgttctacagcattccactccactccactccat

SEQ ID NO: 2197 - DNA, 184 bp, Protomyxzoa rheumatica
gaatggaatggaatggatttcaatggaatggactcaaatggaatggcctcgaattgaatggaatggatggaaattgaatggagaggagtggaatggaatggaattgaagggaaaggattgtaatggggtggagtggagtggactggaatgcagtggagtagactggaatggagtggaatggcat

SEQ ID NO: 2198 - DNA, 130 bp, Protomyxzoa rheumatica
gtggagtggactggaatggagtggaatggaatacaacggaatgcaatggagtggagtggagtggagtcaagtggagtgaagtggagtggtttgcagtggagttgaaaggaatggaattgaatgggatgga

SEQ ID NO: 2199 - DNA, 211 bp, Protomyxzoa rheumatica
gaagatattttccactaatagtagacatattagaaaataagctcattcttgaaactgagttaaaaagccacaaatatctgcatatctacatagttaaataaataaatatatgtatttctctctatttgtatctccatgtcattttgagcaacaggagctcttcttacatttgacccttctccaaacaaatgtgtggtccccacataacagt

SEQ ID NO: 2200 - DNA, 138 bp, Protomyxzoa rheumatica
atactggtattcttgaacaagggcctgagctgtggaggagggagagggaggtgattgggagggctgatgaggagaggcagggcagaaatgagataggtgggtggggctgacaccagtgggtagggcttgtgactcggg

SEQ ID NO: 2201 - DNA, 159 bp, Protomyxzoa rheumatica
actggaatggaatggaaaggaatggaatggaataaatccgagcggattggaatggaatgtaatggagtggaatttaatggaatttattggtatggaatggaatggaatggaatgatatggattggatcggaatgaaatccaatggattaaactggaatg

SEQ ID NO: 2202 - DNA, 125 bp, Protomyxzoa rheumatica
ccattccattccattaaattccattcattccattccagaaggttcaattccattctattccaatccattccattctgtaccattccattctggtccattccagttgattcaattccattctattc

SEQ ID NO: 2203 - DNA, 162 bp, Protomyxzoa rheumatica
ctaccctaatccactccattccattccattccatcccattccaatacactatcttttactccactccaatacattccactccagtccatgccaccagactccattccattgcattctttcttttgacataatcccactctttcacccagtctggagcaaagt

SEQ ID NO: 2204 - DNA, 251 bp, Protomyxzoa rheumatica
gtgtagtggagtttagtagagtggagtggaatcgagtgtactggaatggagtggaatggaatggactcgaaagaaatgaaatggaatggaatggactggaatggaatagacgccaatgaattggacacgaaaggaatggattcaaaaggaatggaatggcatgaactggactcgaatgggatggactcaaatgaaatggactcaaaaggaatggaatggaatggaaaggaattgaatggagtggaattgga

SEQ ID NO: 2205 - DNA, 144 bp, Protomyxzoa rheumatica
gaatggaatggaatggaatggaatggagtgttatgtaatgaattggaatggaatggaatggaatggagtgtaatgtaatgaattggaatggaatggaatgcagtggattggaatggaggtaagtggaatggagtggagtggagt

SEQ ID NO: 2206 - DNA, 122 bp, Protomyxzoa rheumatica
agcacatgatctacgatttctagttttgcttcacttttaagtggaaaaagagcgtaaatactgtggagcgatgtgtcttagactccttccaggtttttatcattttctccagtctctcacag

SEQ ID NO: 2207 - DNA, 206 bp, Protomyxzoa rheumatica
cctaagggggagggtcctcaggagagagggtcctgaggtgggatggtcctgaggggagaagttcctcagggaagaggtcctgagggaagagggtaggtcctgaggggagagggtccttaggggagagggacctgaggtgggagggtcctgaggggaaatggtcctcatggaagaggttcctcagaaagagggtcccgagggaagag

SEQ ID NO: 2208 - DNA, 193 bp, Protomyxzoa rheumatica
tggagaagaatggagtggagtggaatgcaatggaatggagtggactgtaatggattggaatggaatggaatggaagggagttgagggttgtggagtggaatagaatttattggaattgaatggaacggaacggaatggaaaggattggaatggaatggaatagaagggagaggagtggaaaggaatggtatgg

SEQ ID NO: 2209 - DNA, 122 bp, Protomyxzoa rheumatica
ccctacaccttaacccaacactaactgtaacccctaaccttaacccaactctaacagtaaccctgaactttaaccctgactgtaagactaacaccaaccctaacctcaaacataacccttac

SEQ ID NO: 2210 - DNA, 188 bp, Protomyxzoa rheumatica
cttcattccattccattccatcccattccattccgctccattccacttcaatccacttcactccactccacaccaatccagacgactccattccattccattccattccatcccattgcattccattctactccactccactccactgaattccactccactccactccattccactccactccattc

SEQ ID NO: 2211 - DNA, 156 bp, Protomyxzoa rheumatica
gtctctgtctttctctgtctgtctctttgtctgtctgtctgtgtgtatctctctttctctgtctcgctgtttctgtctctcttcctgtctgtctgtctgtaggtctctctctctctccctgtctgtttttttctctctctctctgtctgtttctct

SEQ ID NO: 2212 - DNA, 123 bp, Protomyxzoa rheumatica
ccattccattccattctattccgttccattccattcaattccattccattcatttccattccaatccattcgtgtcgattccgtttgagtccattccattccatttctttcttttccatttaa

SEQ ID NO: 2213 - DNA, 155 bp, Protomyxzoa rheumatica
gggtggagtggaatggagagagttgaatggaacggactagaatgtaatggaatggaatgcaatggcaaaaaatggaatggaatggagtgtaggacagtggagtagagtggactggaatggaatggagttgaatggaatggaaagtagtagaatgg

SEQ ID NO: 2214 - DNA, 256 bp, Protomyxzoa rheumatica
tgaataggaaggaatggaatgggatggaatggaatggagtggattggaatagaatggaatagaatcgaacggaatggcatagaatggaatggaatggaatggaatggcctcgaattgaatggactcgaatggaatagaatagaatggaatggaactaaatgtaatgaacttgaaaggaatggactcaaatagaatggaatcgaaaggaatggtcttgaatggaatttattcgaatagaatggaatcgaatggaatg

SEQ ID NO: 2215 - DNA, 141 bp, Protomyxzoa rheumatica
tatggtgtgggtgacaatgatagtgatgatgatgatgacaatggggattatcctggtgatgatgatggcagtgatgatggcagtaatgatggtgatgatgatgattatggtggtggtgatggggattatcatggtgatgat

SEQ ID NO: 2216 - DNA, 160 bp, Protomyxzoa rheumatica
actccattccattcgagtccattccattccattccattcctgtccattccactccactccactccactctactccactctatcctactacacttcactccactccactacactccattccattccactgcattcgactccactccactccaaacctttca

SEQ ID NO: 2217 - DNA, 159 bp, Protomyxzoa rheumatica
gtaaacatttacctagcttacatgcctgtgctcatcaggccacagaccttcactctgcataggcgagtctcataaaaggcagaaagccctacagtaaatggctttatgatttttcatctaagacaaagcaccccaagagccatgtgggagcccattgtc

SEQ ID NO: 2218 - DNA, 136 bp, Protomyxzoa rheumatica
gccggctcctctctggggactgagcaggcacttattatgcagctcagcaagcaaaaatcatggagctgagcaagcaggaatcacgcagctcagcaggcaataatcaagaagcagagcaggagatcggaagagcggt

SEQ ID NO: 2219 - DNA, 123 bp, Protomyxzoa rheumatica
gcactcaattccatttcattccattccattccactacattccacttccgtctcttccattcaaccacattccactcctctccagtacactcttcctcactccactccactgtattccattcca

SEQ ID NO: 2220 - DNA, 149 bp, Protomyxzoa rheumatica
gcaaaacccgattagccgtaaagatcgaggaagagctacaagaccgagctcaccggatttcagcccatcgggcgctttccctcaatccacgggtgactaaaattgatgccaactccgccatccgaggccttcgatacggacacgcggac

SEQ ID NO: 2221 - DNA, 162 bp, Protomyxzoa rheumatica
ccatttgtttacattaccgtctgttccattttattccattcctgtccattccattccattccacttaagtccattccattccattccttttgagtcgagtacattccattcgagtccattccattccattttctcctgtcctatattttccattccattcta

SEQ ID NO: 2222 - DNA, 231 bp, Protomyxzoa rheumatica
agtggaatggaatggaatgcaatggaattgaacggaatgcagcggaatggaacggaatgagatggaattgatttgaatggaatggagtggacggatgtggagtggaatgtaatggactggagtggagtggaatggagtggaatggaaatgagtgttgtggaatggagtggaaagcagtggattggaatgtaatggaattgaatgggttggaatggattggaatggaatgga

SEQ ID NO: 2223 - DNA, 124 bp, Protomyxzoa rheumatica
atttatcataaacatacaaaaaaaccatatcatgtaaacaaaaaaatataataaaaagaaaagactaagctaaaattactaaactaaagaaggttaagtaacaaacagttaagttgtaatacac

SEQ ID NO: 2224 - DNA, 181 bp, Protomyxzoa rheumatica
ggaatgcataggagtggaatggagtggaatggaatgagaaggaatggaattgaacggaatggagtgaagtagaggggagtggaaatgaaatgcaatggaatggaatggaatgaaatggaaatgaatggaatgaatggaatagaattgaatggaatggaatggaatggaatgcaatggaatg

SEQ ID NO: 2225 - DNA, 180 bp, Protomyxzoa rheumatica
cattccattggattccatttcattccagtccattcaattcgattccattacattcaattccattccactggattccactccgttccattccattgcattccattttgttccattccattgcattccattcctttccatttgtttatattccattcgattccattccattcaaatcaatta

SEQ ID NO: 2226 - DNA, 225 bp, Protomyxzoa rheumatica
attccattccattcgagtccattcgattccattccattccatttaattacattcctttctcgtccattccattcaattaaattcaattcaagcccattccattacattcgagttccattttattacattccattccattccttttgagaccattccgttccattcaagtccattccattccgtttcatctcattccattccattccattccattccattccattc

SEQ ID NO: 2227 - DNA, 132 bp, Protomyxzoa rheumatica
atagaaataatagttttctttatacttttttttgtaaactttcaaatcatatagtaataaaaaaaagcatactaaaacttgataaaacaatttttaaatccataaatagtttgtaaaaaatataaataatag

SEQ ID NO: 2228 - DNA, 211 bp, Protomyxzoa rheumatica
ctgatgattccactgggaggtggtagagaatactctcattaaaaacgaacttaatcccaaatcccattctctgttcttgttgtctccaagttgcctctctcataatgtttccaaaattgttcccctttctctgacatttttactatcccattggctctagcagcccatttttctcagatctgcaaaatatatcattaactataaaacacac

SEQ ID NO: 2229 - DNA, 144 bp, Protomyxzoa rheumatica
agtccattccattcgagtccattccattccagtccattcgattcaattccattccattcgattcccttcctttcgattcctttccactcaattccactccgttcctttccactgaattccattccattccattccattgcatac

SEQ ID NO: 2230 - DNA, 134 bp, Protomyxzoa rheumatica
gggtctgatcaagaggaagcaagaaatctaccctcttcagatcttggatgacaagcgcgtatcgcgacccgagcacattgattgcgctcgggatcacgctccaatctacattattggttgaatactccgcggcg

SEQ ID NO: 2231 - DNA, 168 bp, Protomyxzoa rheumatica
ggcttcaatttcttcttccgtaggttcgagcgttctcaccgtagacagaatgatttctaacatttcgcgcgctttggggctgtatttcgccttacgcgagaagatcgatctgagcgtgtattgcgctaccgcaagaatcgctggcggagtttttgaggcgaaggttgt

SEQ ID NO: 2232 - DNA, 130 bp, Protomyxzoa rheumatica
taggaatagaaatatagggatcaaatacgataagggcaacatgagagagaaactgcagacgatttgagaaaatactgtcgttttacctgctgtaagctgggggtgatggtatattcctctgagcgggtgg

SEQ ID NO: 2233 - DNA, 122 bp, Protomyxzoa rheumatica
aaaagcaccgaccttaataggtgctcggcgaaggacttcaggaaccttatctaaaaaggtaaaaccagcacctacaaggcctacacctttgtaaatttctttaatatctgacattatttatt

SEQ ID NO: 2234 - DNA, 161 bp, Protomyxzoa rheumatica
cattcctttctattccattgtagtgaattcctttccattcctttcgagtccattcctctccatttcatttgagtccattccatttcattccattccagtcgagtcaattccattccattagagtccattccattccatttcattggagtccattccattcg

SEQ ID NO: 2235 - DNA, 175 bp, Protomyxzoa rheumatica
actggttgagaatgtacggaggtggcgatcggccggtgagtagtggtccgtggctgcgtgccatgaagttcgatgcttcattaggtcctccatcgtgttgtcgtgcttgatagtcgggcgggggtcttatgcagacgagatcgatttcaactgtcatcgttggccctcacaagct

SEQ ID NO: 2236 - DNA, 176 bp, Protomyxzoa rheumatica
ctttccattccattctcttccactccactcccctccattacttaccattccattccactccatttatctccattccattccactcgtctgtactccaccacattccattccattcccttccactccactccattcgaatccattccagtaaattccactccaccccactccactct

SEQ ID NO: 2237 - DNA, 175 bp, Protomyxzoa rheumatica
tatttggtgtgtgtgtggtatgctgtggtgtgtgcatagtgtggtatatgtgtggtatggtgtgttgtatgtgtgtgtggtgtgtgtagtatgtgtggtgtgtgtggtttgtggtgtgtggtgagtgctgtggtatgcagtgtgtggtgtgtggggagtgtgtggtgtgggatgt

SEQ ID NO: 2238 - DNA, 155 bp, Protomyxzoa rheumatica
tgtgtgtaataatttaaattcaacaattatccacatatttctgttcttttatgtaagtattaacccagttgtttttgctagaatatgttaaaagaaatcccatatagtttataatttcatccttaaataatatggtatgtacctctaatgggtag

SEQ ID NO: 2239 - DNA, 295 bp, Protomyxzoa rheumatica
aatggaatggacatgaatggattggaggcaagtgtaatggaactgaatggaatggaattgattgtaatgtaattgagtggaatcgaaaggaatagaatggaatgaattgtaatggaaagatatcgaatggaaaggaatggaatggaatggatttgaatggaatggactggaatggaatgtacaagaatggaatggactggagtgtagtggacttcaatggaatggaaacgaatggaatcgaatggaaaggaatgtaatggaatggaaaggaatagaatggaatggaatcagttgg

SEQ ID NO: 2240 - DNA, 137 bp, Protomyxzoa rheumatica
tggaaggggaaaatgaatatgtttctgggaaggtcatcaggagggaacttgtcagagtgctgtgtgtacttgcaaaatttggtctcacactgggagtgttggcagaggtcatgttgacaagggatgaggtttctgta

SEQ ID NO: 2241 - DNA, 130 bp, Protomyxzoa rheumatica
gaatgggatggaatcgaatggaatagacaagaatggaatcgacaggaatagaatgaactcgaatgtaatggattgaaaagtaattgattcaaaaggaatggaattgaatgtaatgtaatcaaatgtaatg

SEQ ID NO: 2242 - DNA, 137 bp, Protomyxzoa rheumatica
ttcttccaagagattccagcgttcaagcagggttgccgtggcgtacgtgtcgatggtttcaggggtcattcgacgcaaccaggcacgcactgccggcaggtgttcccgacacacggtgacgtgaaccaggacaggtt

SEQ ID NO: 2243 - DNA, 246 bp, Protomyxzoa rheumatica
ttccattcgagtccattccttttgagtccattccattccagtccaatccattcgagtccattcctttcgagtccattccattccaatccattctattcgagtccattttattccattccattccatttgatatctttccattacaatccattccattctattcctttcaattgcattcaattccattcaattagtttccgttccatttgattccattccattcgactccattccaatcgagtccat

SEQ ID NO: 2244 - DNA, 143 bp, Protomyxzoa rheumatica
ttccattccattccactccattccacttcactcgactccactccattcaattccatttcaccccattacattccactccattccactccacaccactccgcttcaccgctttccattcgattgcattcaattccatttgattt

SEQ ID NO: 2245 - DNA, 151 bp, Protomyxzoa rheumatica
cactccattgcattccactctactgattccattgcactgcatttcacttcaatccattccatcccattccattccattccattccactgcacgccattccattccactacattccaatccgtttctctccattccactcccctccactcca

SEQ ID NO: 2246 - DNA, 143 bp, Protomyxzoa rheumatica
ttttagttttacgagtaaaaaaactaatgaagcaacctcaacaaaaacaaatctaataattattcaaaacaaaacctcaaagaaaataaataaataaaaaactatttatattacaatcatctttaagaaaataaaaaacaaat

SEQ ID NO: 2247 - DNA, 156 bp, Protomyxzoa rheumatica
atggtgtggaacgcagtggagtctagtggaattgagtggattggaatggaatggagtgcagtggaattgaatggaaaggtgtggaattgaatggaaaggtatggaatggcatgcaatttaatggatgggaatggaatggaatggaatggatttggg

SEQ ID NO: 2248 - DNA, 145 bp, Protomyxzoa rheumatica
gaagggaatggagtggaatgcagtgcagtggattgaagaggagtagaatggaatcccatatattggaatgaagtgcagtggagtggagtggagtggaaaggaatagaatggaatggaacaaaacggaatggaaaggaaaggaatg

SEQ ID NO: 2249 - DNA, 151 bp, Protomyxzoa rheumatica
tccattcctctccattccattccactccattcggtactttcctttacactccactcctctccactccactccattccacttcactctattccattccattccattccattgcattacaatccactccactccactccactcaattccattc

SEQ ID NO: 2250 - DNA, 123 bp, Protomyxzoa rheumatica
actggaatggaatggaatcaaatggaaaagaatggaatggacaggactcgaatgcaatggaatggaatgaactcgaatgcaatcgtatggacttgatcagaatagagtggaaaggaatccaaa

SEQ ID NO: 2251 - DNA, 146 bp, Protomyxzoa rheumatica
cattccaatccactccattccattccattgcattcccttccaatccactctactccattcaatttcattcccctccaatcctctccactccactccattccactcaattccattccactccactcaattccattccattctactcc

SEQ ID NO: 2252 - DNA, 145 bp, Protomyxzoa rheumatica
ggaatggaattgaatggtctcgaaaggaatggagtggaatgcaatggaatgaacttgaatggaatgtcatgcactagaatcgaatgtaatggaatgcaaaggaacagactcgaatggaatgcatttgaatggattggactcgaag

SEQ ID NO: 2253 - DNA, 161 bp, Protomyxzoa rheumatica
ccccacccgctaaagcgccagagcaagcgcaatgtctgttgctctagatgcagcccgcgatcgttcaatattgaaatgagattccctgcttggatcacgactcttcaaagctcttcaatgaactcaaagatgcaggcttaagcaaagctgcgatagaggcc

SEQ ID NO: 2254 - DNA, 140 bp, Protomyxzoa rheumatica
gagtggagtggaatggagtggaggcaaatggagtggtggaatggtgtatagtgaagtctaatggagtgaaatggagtggaacggagtgaaatggcatggagaagaattcggtggaatggaatggaatggaatggaatgga

SEQ ID NO: 2255 - DNA, 170 bp, Protomyxzoa rheumatica
aattgaatggatccgaaaagaatggaacggaatggaatagaatggaatggaatggaacagaacagacttgagtgggacggaatggagtggagaggactctaatggaatggaattgaatggactcaaatgtaatggaatggaatggaagagaatggacttgaatgagatgg

SEQ ID NO: 2256 - DNA, 228 bp, Protomyxzoa rheumatica
atcgaatggaatcgaacgcaatcatcgaatggactcgaatggaattatcatctaatgaaatagaatgtaatcatcgaatggaatcgaatggaatcatcattgattggaatctaatgtaatcgtctttgaatggaatcgaatggaatcatcatcaaattttatctaatataatcatcatctaatggaatcgaattggaatcatcaaccaatttattcaaatggaatgat

SEQ ID NO: 2257 - DNA, 132 bp, Protomyxzoa rheumatica
agtatataatatatactttgggtattttgataatttatatagagtttataatatatatttcatgaaatttgatactttatgtacagtatatagtatataatttgggtgctttgatattttttgtacagtata

SEQ ID NO: 2258 - DNA, 131 bp, Protomyxzoa rheumatica
agtacattccattccattcgaatccattgcattccaatcgattcgtgttcattcaattttattccattcctttccttttgaatccattccattccaatacattccattccattgcattgcattccattcca

SEQ ID NO: 2259 - DNA, 130 bp, Protomyxzoa rheumatica
gagtggagtggaattgaattgagtagaatggaaaggagtggaggggaatggaactgagtggaatggattggaatggaatggactggagtggaatggagtagagtagaatggagtggtgtggagttgaatg

SEQ ID NO: 2260 - DNA, 162 bp, Protomyxzoa rheumatica
ccattccattcgagtccattccattccagtccatttcatttgagtccattccattccattcaattccacttgatatctttccttttcattcctttccattcttttcctttcgattccattcaattccattccattcaattccattccattgtattccattcc

SEQ ID NO: 2261 - DNA, 367 bp, Protomyxzoa rheumatica
tggaattcaatggaatgaagtggagtgcattggaatggaatggaatggaagggaatgaaatggagtggagtggaatggagtggaatgcaatgaaaggcagtgaagtgtaatggaatggaatgaaatggaacggaattgaatggaatggagtggagttgaatggagtcgagagcaatgaaatggactggaatgaaatggaaagggatagaatggaatggaatggagtggatttcaatggaatgtaatggaatgtagtggaatggagtggactggagtgcagtggaatggaatattgtggagtggagtggaggggaatggagtggaaaggaatggagtggaatggagtggaatggattggattggagtg

SEQ ID NO: 2262 - DNA, 148 bp, Protomyxzoa rheumatica
cattcatttctattccaccccttttcattccactccattcaaatccactccactgcatttcaccgcattccatttgattctgttccattcatttccattccattgccttcaactccattcaattccattcgattccattccattcgat

SEQ ID NO: 2263 - DNA, 163 bp, Protomyxzoa rheumatica
tttcattccattacattccattccattcgagttcattccatttctttacattccattccattccagtccattcaattccattccattatattcgagtcccttcggctccattccattcgattccattccgttccattccattgcattccttccattccattcc

SEQ ID NO: 2264 - DNA, 136 bp, Protomyxzoa rheumatica
ttcatttccattccattgcattccattccattccattccactgccttccactccattccattccattccaatccactaaattctattccactccaatccactccattccattccaatccaaaccattccattcctt

SEQ ID NO: 2265 - DNA, 128 bp, Protomyxzoa rheumatica
tattattatccacacttttggttaaagaatttttgtaaaagtttgttttctgttttggaagttgtttggatgttctgtgctatgttttgttttagtgtgtttgaatttcgttgtgtcttagtgagttt

SEQ ID NO: 2266 - DNA, 122 bp, Protomyxzoa rheumatica
aacggaatggaatgaaatcaacccgagtggaagggaaaggaatggaatgaaataaaattgattggaatcaaatggaagggaatgaaatggaaaggtatggaatggaatgcaatcaacccgag

SEQ ID NO: 2267 - DNA, 125 bp, Protomyxzoa rheumatica
gaacatgagtgtgtgtgcctgtgtgaatgtgtgtgtgcgcgcatgtgcgtgtgtgtgtgcatgagtgtgtgtgcatgtgtgagcatgtgtgtatgtgtgtgcatgggtgtgtgtaaccatgtgcg

SEQ ID NO: 2268 - DNA, 231 bp, Protomyxzoa rheumatica
agagatcaattaatacggtgatagtcgagccgcaaagtctcgtgcgggacatcctgtcgtcacttctcgtgccgcattcgttcaatatcgtcggcaccttcgccacaattcacaaattcgacgacgtccatcgaaccttggatgacgtcgatctgactattctgagtggacagagtgtcgaccaagcggtggccaccgcggaggtgatgctcgctgcttgccctggtggca

SEQ ID NO: 2269 - DNA, 139 bp, Protomyxzoa rheumatica
ccatcgatcaccaactcactccgccgagccggcgcgttgggttccgaacgaggaacggtctcgtcgagagtaaagagtcgaacattgtcctcgacgacgaggtcgatcgacctcatcagcaggtcatgagacacatgca

SEQ ID NO: 2270 - DNA, 164 bp, Protomyxzoa rheumatica
gaatggaatggaatgaaatcgaatggaatcgaattgaaaggaatgaaatgaaatggaacggaaaggaatggaatctaatggactccataggaatggactcgaatggaatgccttcaaatggaatggaaaggaatggaatctaatggactccataggaatggact

SEQ ID NO: 2271 - DNA, 133 bp, Protomyxzoa rheumatica
catcgaatagaatcgaatggaatgcggtgacctgtagtgcagcggactagaacggagtggaatggaaaggagtggaattgaattgaatggagtggagaggatggagtggagtggaatggaatggaatgggaag

SEQ ID NO: 2272 - DNA, 128 bp, Protomyxzoa rheumatica
ataacatgattatattcgattccattcgaagatgagtccatttgtttccattcattgattccattcaattccattgaattattttattcgatttcagtcactgatggttcaattcgattccattcaat

SEQ ID NO: 2273 - DNA, 135 bp, Protomyxzoa rheumatica
atgttaggatgcttcactgctaaaagagcacgtgtctcctgagaacactctctggcataatcacaatgcctccatcatatccaagaaacataaccttgatataatatcaccgaacatagttcatattcaaatttt

SEQ ID NO: 2274 - DNA, 164 bp, Protomyxzoa rheumatica
tggatcgtagtgcagtgtagttgagtggagtggaatggaatggagtggggtggattggagttgaattgaacggagtggggtggagtcgagtggactgcagtggagacgaacgaagtggagtggagtggaatggaatggattggaatggaattccattgagtgga

SEQ ID NO: 2275 - DNA, 142 bp, Protomyxzoa rheumatica
ggactggaatagaatggactcgaacgtaatagactgcaatgtaatagattagaatggaatggaaccgaatggaatgtaaacaaatggaattgaatggcatgcagtggaatggaatagaacagaatgcaatggaatggaatgg

SEQ ID NO: 2276 - DNA, 133 bp, Protomyxzoa rheumatica
atttctgtcttctcagccctaagagcaccataggtgaataattcttgtgtagtcttcgtattagtaaaaaatcatttgctcttcagttttaaatggagggaatttagtacaggaaattggttacaaaaggttt

SEQ ID NO: 2277 - DNA, 131 bp, Protomyxzoa rheumatica
ctgcgtcagccagttctttccgctgctgatgctgatccatacgccggccggatacgtgcatttcaccgcggaggcgctgtccgacgccgttgcgccgctggttcaggatgacggaggtcccggatgaagaa

SEQ ID NO: 2278 - DNA, 134 bp, Protomyxzoa rheumatica
ccttgatttttgccagctgagctgcgagattcgtgcctgctcagctccttgatctttgcctgctgagctgtgtgattcctgcctgctcagctccatgagtattgcctgctgagctgcatgattggtgtctgctg

SEQ ID NO: 2279 - DNA, 147 bp, Protomyxzoa rheumatica
actccactccattccattgcactccactccactcccctctactccattatactccattccatccctctccgttctattccactccactccattccatcccattcctttccattccactcaaaaccattccattccactcccttccat

SEQ ID NO: 2280 - DNA, 129 bp, Protomyxzoa rheumatica
tgtcttatgtgttgtatattgtgtgttgtctatagtgtgtcatgtgtatgtgttgtgtgttatgtgttgtatatggtgtgtgttgtgtgctgtctgtggtacggtgtgtgtttgtgtgttgtgtggctt

SEQ ID NO: 2281 - DNA, 158 bp, Protomyxzoa rheumatica
tcattccttttcattacattccatccaacccactccattccattccatttcacttcactccattccattctactcttctccactccatgccactcctttaatctccattccattccatttcacctcataccactccactctgcaacattccactccac

SEQ ID NO: 2282 - DNA, 160 bp, Protomyxzoa rheumatica
aatatatgtaagtagaatatttgagatacaggcagcttacacttaagtctgaataattatttatgaaaaatgtaaagaaataatctggagtgaaaatctcaagttatttcaacataagagatgaggaggagataagaaatgaaagcatacaaagcttctt

SEQ ID NO: 2283 - DNA, 132 bp, Protomyxzoa rheumatica
ctcttttaacagagaatttaataactcaaatgttgcataattattatagtacttggattttgccctgccatctcggttgtataagaattgatttgccatgtgtttttcctttttgtctcttgtttcccttcc

SEQ ID NO: 2284 - DNA, 159 bp, Protomyxzoa rheumatica
agtggaaagttgtgaagtggagtggaatggaatcgagtgcagtggaataaaatggagttgagtggaatgtaatggaatcgagtggaatggaatggagtggagggaactgtgtggagtggggtagagtgaaggggagtggaatggagaggaacggaatta

SEQ ID NO: 2285 - DNA, 174 bp, Protomyxzoa rheumatica
ttccattccattccattgcattacattccattgtattccattccactccactccactccactctgttcaattccactccttcccactttatttcactccactccattccaccccactccactctgctccattcaattccattccaccccattccattcctctccattccactcc

SEQ ID NO: 2286 - DNA, 140 bp, Protomyxzoa rheumatica
ggagagcagtgttgtgcaatggaatggaatggaatggagtggggtggagtggaatggaatggagtggaaagcagttgagtgcagtggataggaatggaatttagtggaatggaatggagtggcattgaatgaaatggaat

SEQ ID NO: 2287 - DNA, 122 bp, Protomyxzoa rheumatica
atggaatggaacagaacggaatggaatggaatggaatgcagtggagtggagttgtgtggagtggatgggagtacagtggaatggaatagtatggaatggaatggagtggagtggaatggagt

SEQ ID NO: 2288 - DNA, 141 bp, Protomyxzoa rheumatica
caccgacccgctcaagaagaggaccttcgcacgaaactatcggcagtccttgacccggattgacgcgttcattcgctcgcgaaagctcaacgcgcaggaagtcgcgcatatcaatttcatcatcaagaagcgcgcgcgccg

SEQ ID NO: 2289 - DNA, 125 bp, Protomyxzoa rheumatica
gtgtccgtcaggatgtgtttaccctgtgtgtgtgtctgtgtgtctgtgtctgtccatcgggatgtgtttactctgtatgtgtgtctgtccgtcgggatgcatttactgtgtgtgtctgtgtgtgt

SEQ ID NO: 2290 - DNA, 133 bp, Protomyxzoa rheumatica
tgattaaattcatttggaagtcaatattcacaacagtaaaaacagatggtatgttagactattatatacagtacatttatcctcccctatcataccactgaatgtgcattaaagatctgggagtcttttctgc

SEQ ID NO: 2291 - DNA, 132 bp, Protomyxzoa rheumatica
tggcttttggagctgtgggtgaaattgagcaaaccccggcctggtgaacggcaggatgagggctcagggaggcagggcacgctccattgtcctctgttacatcagagcagctggcatttaggacttacactg

SEQ ID NO: 2292 - DNA, 124 bp, Protomyxzoa rheumatica
acagggattccgggcaagcaacatatttgcggataaacattctgatataaaatccgtctgcgccccgcaggacaccgagcatcggctaatgctccgacgcccccaatctaatgctcgcccaact

SEQ ID NO: 2293 - DNA, 154 bp, Protomyxzoa rheumatica
tggaatggaatggaatggaatggaatggagtggattggaatggaatgaagtgtaatggaaaggagtggaatgggatggaatggactggagaggagtggaatggaattgaatgcaataaaatggaatagagtgaagtggagtgaagtggaatata

SEQ ID NO: 2294 - DNA, 251 bp, Protomyxzoa rheumatica
cattacattccattcctttccattccattcctttccactccacttcatttcaatccactcctttccattaaattcctccctactccactcctctccactccattccattccattcgactgcactctgatccactccactcaactccactccactcaactgcactccaccccactccactccattccactccactccactccattctgctcctctccatgccattccactccactccattccattccactcc

SEQ ID NO: 2295 - DNA, 128 bp, Protomyxzoa rheumatica
cgaagaaggtgacgggtcctatcaacgatagcgagctccaaatgatggatgaagctctcaagttggttctaaggaagaccaaaaatgggagagtgatggaaggagatcgggctaacacgtctcttacg

SEQ ID NO: 2296 - DNA, 160 bp, Protomyxzoa rheumatica
tgaatggaatggactggaatggagtggactcgaatggaatagaatggaatggactcatttggaatagaatggaatggagggaaatcgaatggaatggaatggaatggaatggaatccaacggaatggaatggaatggtttcgaaaggaataaaatggaat

SEQ ID NO: 2297 - DNA, 141 bp, Protomyxzoa rheumatica
atagaatggactggaatggagaggaattgaatggattggagaggaatggaatggaaagcagtggagtggaatccactcaaacggaatgaattggaatggaatgcactggaatggaattgagtcgaatggactggagtggaa

SEQ ID NO: 2298 - DNA, 138 bp, Protomyxzoa rheumatica
ccattccattccgttccattccactcaactccactacagtctactccactccaatccattccagtacactccattccattacactctactccattccagtccactccatttaagtccaatccgttccattccgttcca

SEQ ID NO: 2299 - DNA, 213 bp, Protomyxzoa rheumatica
ttcgacttcattccactgcattccatttcattcgaatccatcccattccattccattccactctagtctattccattccattgcatgccattcgagtccactccactgcattccataccattcgagtccattcaatgccattccgttccaaaagacaccattccactccattccgttagagtaaattccattcgattcgagtgtattccatta

SEQ ID NO: 2300 - DNA, 123 bp, Protomyxzoa rheumatica
tgagagaatatatatttaaggtaattttgttgtcgtttacttttgctttttcttcttttattgttgttttcgtgtgttctttactttcgtttaattattttatagttaaaggattttgttttg

SEQ ID NO: 2301 - DNA, 87 bp, Protomyxzoa rheumatica
actctatataacatatatgttatatacttataacatatatgttatatactctatataacatatatgttatatacttataacatatat

SEQ ID NO: 2302 - DNA, 127 bp, Protomyxzoa rheumatica
aatgatgagactggcaacgacactactatgctgcgctgaattaattcggtgcggcatgttgatccgtgtcaagtcctactctcgtcaatacttgggggggcgtgaaaaaacgcaggagatatctgat

SEQ ID NO: 2303 - DNA, 128 bp, Protomyxzoa rheumatica
gaagtgaaatggaaaggagaggaaaggaatggaatggaacggaatggagtagagatgagtggagtggagtggtatggaatggagtagaatggaatggagtggaacagagtagagagaagtggagtgga

SEQ ID NO: 2304 - DNA, 188 bp, Protomyxzoa rheumatica
tattttctgactgatcagcattttctgctgagatgaattagtcaacgagttacggcaggggtatgcagcgagagagaaattaactccccaaatgtacatcttatgtaggtaatatctatcccccaaatttgcagtaacagtagttaaggcaactaattcctataaacccccaaataagttgtggctat

SEQ ID NO: 2305 - DNA, 131 bp, Protomyxzoa rheumatica
tttaaagctagggaatcacttgttctgattcattttttgacaatattattatggttatggatatggagaatgcattgtaggagggcagaaaaatatatcatggattctagaaaagatggatctttgttttg

SEQ ID NO: 2306 - DNA, 128 bp, Protomyxzoa rheumatica
ccacttcactccactccattccattccatcccaggccatttcgttccattccactctattccattccaccccattccactcgaatccattacattcttctcgacaccactccaatccactccactcct

SEQ ID NO: 2307 - DNA, 165 bp, Protomyxzoa rheumatica
ttccattccattccattcgattccattccattccattacattccattggagttcattccaatggtgtccacgacattcgagtccgttccattccattctgttccattgccttccattccattctgtttgattccatttgaatccattccattcgagtatattcca

SEQ ID NO: 2308 - DNA, 122 bp, Protomyxzoa rheumatica
aattatagaaactaagagtttacattgcattttttcccaacttttattttagatggaagatttggaaattcttttgtttatcttaatttccaaaaccttgctaaattctcctattagtgcta

SEQ ID NO: 2309 - DNA, 127 bp, Protomyxzoa rheumatica
ctcagccactgtcctttcttccttggtgactccgtgtggtgggttcctatttgctccatctctgtgctgttcccagtgtctagtgcaaggctttgcatgcggtaggcatgtaggcatttgctgcatg

SEQ ID NO: 2310 - DNA, 129 bp, Protomyxzoa rheumatica
tcgaatgtaatccaatggaatcatcgaatggaatcaaatggaatcatcgattgaaattgaatggaatcagcatcgaacaaaatcgaatggaatcatcatagaatagaatcgaatggaatcatagaatga

SEQ ID NO: 2311 - DNA, 128 bp, Protomyxzoa rheumatica
acttgtacagttagattcacaagttgtcaagaggcctggggcctggagaacagaatgacatagaaacctaattatggcctggaggttttgcaggaaatctgaggaacaagatgctgccattgtcaagt

SEQ ID NO: 2312 - DNA, 164 bp, Protomyxzoa rheumatica
tgtgactgtttagaaaacgattggaaaacccattctgaacagtatgagtttgcatggctctcctgggcggatgtgtcaccctcggctgggcttactctggcgtctgtgtggagaggaggcagggctgcccacgcagtcttctcagaagaggcagctgatggctg

SEQ ID NO: 2313 - DNA, 156 bp, Protomyxzoa rheumatica
tgtaaaacttttaaaaccattgtaaaaggttttagaatgatttacaaggatttcaaaatatttataaaggcttttaaatgagttttaaagtatttgcatatgtatttaaagactttataatgattttatgtggttttaaaatgatttacaagagtt

SEQ ID NO: 2314 - DNA, 272 bp, Protomyxzoa rheumatica
ctccattccattccattccattccactcaactacactgcactccactccattcaattccattccttccccttccattcctttccactccattgcactccactacactccaatccattcaattccatgagtccatttcattcaagtccattccattcgagtccattccattcccttccattccatttcatttcattccattcgatttcattcaatttgtgtccattccaaccgagtccattccattccattccattccgttccgttccattcc

SEQ ID NO: 2315 - DNA, 140 bp, Protomyxzoa rheumatica
ggaatggaatgcaatggaatggatggaacggaaaggaagggaatggaatggaatggaatggacttgaacggaaaggaatgaacatgagtggaatggattggaattgaatgtaatggaacggaatggaagggaatggaatg

SEQ ID NO: 2316 - DNA, 130 bp, Protomyxzoa rheumatica
ttccactccattcaattccattctattccactccattctattctattcaattccactccactccattccactccactgcactccattccactcgaattcattccactccactccattccatttcattcca

SEQ ID NO: 2317 - DNA, 172 bp, Protomyxzoa rheumatica
tctccattccattatattccgttccacttaattccattccattatattcgagtctattccattcctttccattcgagtccattccattccagtacattccattaccctcgagtcaatttcatacaattccattccattggatttctttcccttccattcgaatccattccat

SEQ ID NO: 2318 - DNA, 255 bp, Protomyxzoa rheumatica
agaaaggcccaccataagcttggatgaggaatgcgacgggcactttcgaatgctgtattggccaaatctcagttccgcaaagatggatcaaggcttaatccgcaaagtgctattcgagagtggagcgctcccgatgccagcttctcgcaaccgacatccagaggaaaatggatttgctttccgcgtaaacctcctccgactcgatgacgcgggcttgggaggacttaggcggctggcggacgcgctcgatgcact

SEQ ID NO: 2319 - DNA, 174 bp, Protomyxzoa rheumatica
actccattccattccattccattccgttccattccattctcatccactcaattccattcatttcaattccattcaattccattccattctatctcgttcaagtccattccattcgataccattccattctgtttctgtccattccattgtattccattaaactcgatttcactc

SEQ ID NO: 2320 - DNA, 198 bp, Protomyxzoa rheumatica
caacctgagtggaacagaatggaatggaatggaatggaataaacctgagtggaatggaatggagtggaatgtaatgtaaaggaatgaacaagagtggaatggcatggaatggaatggaatggaagagtggaatggaatcaacccatgtgaaatgtaaaggaatgtactgtaatgaaatgaaatcaacacgagtggaat

SEQ ID NO: 2321 - DNA, 137 bp, Protomyxzoa rheumatica
taataacatgtgttccaggctggaaggaggaataagtgatatttgtctatttcaaatttccaaatatcataacataaaattggaaagattttccttagtaaatttctgtgtaacttttattaaacattttcacagag

SEQ ID NO: 2322 - DNA, 186 bp, Protomyxzoa rheumatica
tccaatctattccattcgagtcctttccattccattctattccattcgtgtcatttactttctattgtagtccattccattccattccttttgaattcattccatttcatccctttcaattcccttgtagtccattccaatgcataccattccatcccatcccattccattccattccattccatt

SEQ ID NO: 2323 - DNA, 127 bp, Protomyxzoa rheumatica
tccattccattccattccactcaggttgactccattccataccattgcattacattgcatcccattcctttcctttcgattccattcctttccattccatttctttccactcgagttgattccattc

SEQ ID NO: 2324 - DNA, 175 bp, Protomyxzoa rheumatica
gcgcgataaggggttctattcatgacacagaaccaaactttgagcctggaaaagttaagcgccgaccttaccgccgcgctcggtgatcgtattgttgaatgcaaagtggccttcggtgaagtgaacctgacggtgaaagcagattcctattttgaatcgtgcacgatacttcgcg

SEQ ID NO: 2325 - DNA, 156 bp, Protomyxzoa rheumatica
gtgaggctgcacagagggcaatgcagtcgcttaaggccacacagcaggtcagagagagtgagatgtggcaaagctgaaggtgagcccagagaggctgcttggaaggagcctgggagcctgaggtggggcagaaaaaactgctcaccctgctaggtt

SEQ ID NO: 2326 - DNA, 142 bp, Protomyxzoa rheumatica
aatggaatggaatggagtggagtggaatggaatggaatggcatggagtttaattgtgtggagtggattggaattgaatggaatgaaatggagtggaatgcaatggaatggaatggattttaatggaatggattttaatggaa

SEQ ID NO: 2327 - DNA, 128 bp, Protomyxzoa rheumatica
aagcacacaataagtatttattatatgtctaatacatgtaatggatattagggatttttagtaaatccctaattaagttaagtatttatgaagggtaatgatttcagagcaacagtgatagaagagtg

SEQ ID NO: 2328 - DNA, 124 bp, Protomyxzoa rheumatica
ttcaaataaattccatttgagacccttcctttctagtccattctatttgagtccattaaattcgagtccgttacatgtgtgtccattccattacattcccatccatttgatggcattcctttcc

SEQ ID NO: 2329 - DNA, 142 bp, Protomyxzoa rheumatica
gaatggagtgcagcggaaaggaatggaatggaatggaatggtatggaatggaaaggaatgcaacggtatggaatggagtgaattggagtggaatggaaaggagtggaacagactggaatgcagtggagtggaatggaatgga

SEQ ID NO: 2330 - DNA, 194 bp, Protomyxzoa rheumatica
tccattccaatctgttcaattccaatccattgaattacattccattccacttaactcaattcccttccattccactcaaatccacttcattcaaccccattcctttccattcttttccattccctttcatttaattaccatccatccgatcccactccactgcactccacttcactccattccattccactcca

SEQ ID NO: 2331 - DNA, 169 bp, Protomyxzoa rheumatica
ccccactccattccattctgttccattccactccaataccctccaatcctttccaatccattccattccatttcacttcaatccattccattccactcctctcctttctattccaatccattgcattcaaatccattccactccattccgttccattccactccattac

SEQ ID NO: 2332 - DNA, 151 bp, Protomyxzoa rheumatica
tcgggatggcgcacgatcgaatgcggctggccgatcaattccgcctcgctgtagccgcagacatcactgaacactttgttggcgtaagtgatgcggcctttgagatcggtcttggagacgatgatatcgtccgcatcgaaaaatacttcga

SEQ ID NO: 2333 - DNA, 125 bp, Protomyxzoa rheumatica
tccattccatcccattgcattcaactccactccactgaactccactacagtacactacactcccttccattccattccattccattacactagattccattccattcctttctttcgacaggatc

SEQ ID NO: 2334 - DNA, 241 bp, Protomyxzoa rheumatica
acactccattccattctgttcctttcgattccattcaattccactccattcgattccattccactcgattccattccattcaactccatgccgttcatgtccattccattccattccgttccattctattccaatccgtcactttccattttgttccagtcaattccactcgagtccattccattgcagtccattccattcgagtccattccattccattccattcgatatctttccatta

SEQ ID NO: 2335 - DNA, 130 bp, Protomyxzoa rheumatica
tccattgcattccattcgatgccattccattcaattttttccatttgactccattccattccatttctttccatccgtttccattccattctattgctttccattgcattccattcctttccagtccatt

SEQ ID NO: 2336 - DNA, 159 bp, Protomyxzoa rheumatica
ggaatagaatggaatggagtggatgagaatcaatctgagtggaatgcaaaggaatggaattgaatgcaatggaatgcaatggaatggaatagaatgaaccagagtggaattgagtggaattgaccggaatggaatggaatggaatggaatggaatggaa

SEQ ID NO: 2337 - DNA, 207 bp, Protomyxzoa rheumatica
ggaatgacatggaattgaatggaattgagttgagtggagtggagtgcagtggaatggaatgcaatggagtgaaatggaagggaatggagttgaatggaatggaatgcaatggattggaattgaatggagtcaagtgaaatggaatggaatgaaatggagtgaaatggaaagcaatggagtggaatggattggaacggtatggagtgt

SEQ ID NO: 2338 - DNA, 129 bp, Protomyxzoa rheumatica
cattccattccatgctattccatttgagtcctttacattccaccacattcaaatccattccattccatcccattccatttgagcccaatccattccattgcattcacttcaagtccattccattccaat

SEQ ID NO: 2339 - DNA, 164 bp, Protomyxzoa rheumatica
aattgagtgcaagagaatggaatggaatcaactctggtggaatcgaattgaatggaatgtaatataatgtaattaatggaatggagtggaatggaatggactggaatgcaattgaatggaatgtaatcaactcgattggaatggaatggaatggaatggaatgg

SEQ ID NO: 2340 - DNA, 126 bp, Protomyxzoa rheumatica
tattccactccattccttttcattcctttccactccagtccattcaactccattcaggtaaattcaactccactctattccatttcattccactcaacttctctccactgcactccactctactcc

SEQ ID NO: 2341 - DNA, 137 bp, Protomyxzoa rheumatica
ccattctattcatttccattcgattccattccgttccattccatcctgttccagtcgtttcatttccattccattctagcccattccactccagtccattcaattcgagtccattccatcccagtccattccattcg

SEQ ID NO: 2342 - DNA, 147 bp, Protomyxzoa rheumatica
cagaatcgaatggactggaatggagaggactcgaatataatggattgcaatctatttgattcgaatggaattgaattgaatggaatgtaatcaaatggaaaagaattgaatgcaatggaatggaatagaatggaatgcaatggaatg

SEQ ID NO: 2343 - DNA, 138 bp, Protomyxzoa rheumatica
tgattccatttgattccattcgatgattattactatcaattccattcggtgattccattcgattccattcgttgattactccattagattccattagatgattacatttgattttattcgatgattccattcaattcc

SEQ ID NO: 2344 - DNA, 192 bp, Protomyxzoa rheumatica
tgtggtatgtaatatgtggtatgcatgtgcttgtagtatgtgtgctgcgtgtgtggtataaatgtgtgtgtgatatatatgtgtggtgtgtatgtgtagtgtgtatagtgtgtgcagtatgtgatgtgtgtgatatgtaatacatgatgttcatgtgtgtggtgtgtggtgtatacgtgtgcatggtgtgta

SEQ ID NO: 2345 - DNA, 123 bp, Protomyxzoa rheumatica
atcaccatcactatcaccatcatcaccatcactatcacatcactatcaatatcatcaccatcacatcactatcacatcactatcactatcaccatcacatcagcatcatcaccatcactatca

SEQ ID NO: 2346 - DNA, 133 bp, Protomyxzoa rheumatica
atttagttggatttcaaatttttaaccactttattattattgtttgattttttctatatatatttgggtgtaaatgattttatattttgttaaatataatataattttatatttgattaaatatgatatgatt

SEQ ID NO: 2347 - DNA, 125 bp, Protomyxzoa rheumatica
gccactatgatcggaaccgttcagcggaggcatgtatgacaacaaggccagagcttcagcgtaatcccgaccggcgttgaggctatgacacataggtgaggcccccaccccgctccgtgacaagg

SEQ ID NO: 2348 - DNA, 147 bp, Protomyxzoa rheumatica
tccattcaaatccgttccattccattccattcaaatcgtatccattctattcctttagagtccattccattccattcctttctcgtccattccattcttttccattcgattccattgaagtccattccattccataccattccattc

SEQ ID NO: 2349 - DNA, 123 bp, Protomyxzoa rheumatica
atagaacaagtgaaaaagaaacagacaacaaaaaagctaaagcaaaagtacagtgtgtgagagatagtgactgcgagagagagagagagagagagatagatttttgcacactcgaagagggaa

SEQ ID NO: 2350 - DNA, 122 bp, Protomyxzoa rheumatica
acagtacattccattcgactccattccattcctgtccatttcattggcttccattccattagcttccattatatttaattccattccactcaattccactctgttccattccattgcattcc

SEQ ID NO: 2351 - DNA, 123 bp, Protomyxzoa rheumatica
ggaatggactggaatgaaatggactcgaatggaatggactggagtggaagggaattgaatggtacagaaacgaatagaacggaatggaaaataatagaatggaatggaatggaatggaatgga

SEQ ID NO: 2352 - DNA, 125 bp, Protomyxzoa rheumatica
ttaaaaaaaaaagctcttcagttttggtttctgcagtctccaatggctctcaagctctttctctttgctcttcttctctgtctcccgacttctctctcctccactgcctctaaaggtcacttctc

SEQ ID NO: 2353 - DNA, 157 bp, Protomyxzoa rheumatica
ttccattgtattccgttccgttccattctcttccattccactccattccatctctccactcaattccactccactccaattcactctgtgcaattaaatttcactccagtccacttccctggaccacgctccattccacaccactccattatgttcc

SEQ ID NO: 2354 - DNA, 127 bp, Protomyxzoa rheumatica
gaatggaatggaatggagtggaatggaatggagtggagtgcagtggtgcggattggagtagattggagtggagtggataggagtggaatggtatggagtagagtgtattggtgcggagtggagtagg

SEQ ID NO: 2355 - DNA, 160 bp, Protomyxzoa rheumatica
ggaacgccttcgaattttgtgctgtagtagccctctgttaattgagtagatgatgattgctgatgtcccgttactgatcctccccgcagtaaactcagctttgcatcacgttcacgctgtcgaatctcttcttcctcaacaagccaccgaggggcataga

SEQ ID NO: 2356 - DNA, 122 bp, Protomyxzoa rheumatica
ttatatataaaataaacgaaatatctaatattaagtaactaaaatggagaagaaaaagaaaaagagagagagagaaagcatgccaaagggagcgaaagagaaggatgaaattgagaggggca

SEQ ID NO: 2357 - DNA, 142 bp, Protomyxzoa rheumatica
cctgggcagatggaggcccagggcaaatgaagcaacatcttcctcatcactcacaggcccaggaggggcaggcacagctctgttgacttccatcttctcctccaaccccatggtcagggagagctccaggcatgtgtatcta

SEQ ID NO: 2358 - DNA, 133 bp, Protomyxzoa rheumatica
agaaaaacaaacatatatatttgtagatgaaaactatatcaagatatgtaatatttctatgctaatctcgcagttgtgttactatctaaatttaaatttgcatattgtattatcgaattttgtggtaactcga

SEQ ID NO: 2359 - DNA, 165 bp, Protomyxzoa rheumatica
ttcctttacactccattaacttcttttccttttgattccattcatttccattccatttgattccattccatttgattcccttccattccactccattcctttcgaggccattccttccattccattctgtatcgttagattccaatctgttcgattccattttgt

SEQ ID NO: 2360 - DNA, 150 bp, Protomyxzoa rheumatica
caattcggatccgcatttcttgcccattggctctggcaaatgcacgctgttgctgctcaatcatctctttttctttgccagcggcagtcaacagattcactgaaacaatcttgatttcaatggcttcttctgtgttcatattgcgggcat

SEQ ID NO: 2361 - DNA, 182 bp, Protomyxzoa rheumatica
cttctctgtgatgtgtgcgtttaactctcagagttcaaccttccttttgatggaagagtgttgaagtattctttttgtagaatttccaagtgagtatttagagcggtttcaggcctatgtagaagagaaactatcttcacagaaaaacttgacataattgttctctgaagctactctgtgat

SEQ ID NO: 2362 - DNA, 148 bp, Protomyxzoa rheumatica
tcaatgattccatttgattccatttgatgattccatttgattgtattcaatgatgattccattcaattccattcgataaggactgcattctattccatttgatgattccattcaattccattggatgctgattccatgtgattccatt

SEQ ID NO: 2363 - DNA, 125 bp, Protomyxzoa rheumatica
cactccactccattccattccactccacgccactgctttccattacattacattgcattccatttcattcctctccattccaatctatttcactccactccaatccactccattccacttcattc

SEQ ID NO: 2364 - DNA, 138 bp, Protomyxzoa rheumatica
agtggagtccagtggaatggaacggaatgggaaataactgaattaaattcagtggagtgggatggagtggagtttgatgcaatggaatgtaatggaaagtagtggagtggagtggagtggagtggaacgaagtggaat

SEQ ID NO: 2365 - DNA, 201 bp, Protomyxzoa rheumatica
ttccactccagtgcactccactcaactccactccactaacttccactccattccattccaatccatcccattctattccactctattcccctccactccactcccctccacttcactgcactttaatccaatccagtccactcttgttcactccactccactccattccactccatcccattccattccactccattccac

SEQ ID NO: 2366 - DNA, 146 bp, Protomyxzoa rheumatica
gctctcggggtgattccattccattcctatccattccattccactgggctgattccattccattccattctcttccattccattcaattccattccacttttgcttattctattccattccattccattccattccattccattcc

SEQ ID NO: 2367 - DNA, 143 bp, Protomyxzoa rheumatica
acctcaccatgtccttgatcccgtgctttaccttgtccctaccttcatcctgactttactcctcaccatgatcctgatgctgatcttcacctgcaaccccaaactttctctgacccagacccttatatttatcaagtttctga

SEQ ID NO: 2368 - DNA, 131 bp, Protomyxzoa rheumatica
tcgaatggaatggaatccaatggaatggacaggaatgaaatagaatggaaatgaaaagaatggaatggaatggaatggagtggaatgatatggactcgaatagaatggaatggaataaaatggaatggaac

SEQ ID NO: 2369 - DNA, 132 bp, Protomyxzoa rheumatica
aggcaatatgcgagaagcgaacggttgagcgttgcatctgtcgagttgtggtatcaagcctcccgcgatgtaatggcgcgaattcgacttatcgttgtagataagtcacaaatctgaactgctgcgtggtaa

SEQ ID NO: 2370 - DNA, 129 bp, Protomyxzoa rheumatica
cgctaaatgccagggcgccggattttgacttgaagatctggtcgtccagtcttaattgacgcaattcagattacaattcgcggttgagttaattctatgattcctgaatacgagttgcatcgcttgggt

SEQ ID NO: 2371 - DNA, 138 bp, Protomyxzoa rheumatica
gaccggatcatcgtcgcgcatcaatcgatcttcgacggatcgagtttcctgcaaccctatgtgtccaaatgcgtgactatcccgttcggggtcgataccagcgaatggaccaacgtcgacgacgccttacaacgacgg

SEQ ID NO: 2372 - DNA, 144 bp, Protomyxzoa rheumatica
tcaaacggattgtaatcgaacggaacagaatagaatggaatggaagagaatggactcgaacggaatggtgtcgaatggaatgtaatcgaaaggaatggaattgaatggagttgaaaagaatagaatggaatggaatggagtgtc

SEQ ID NO: 2373 - DNA, 207 bp, Protomyxzoa rheumatica
acacacacacaccaatacatgcaccacgcatatagcccaacacacacatacgcatacacacaccaatacatgcaccatgcatataccccaacatacacacaccaatacatgcaccaacacatataccccaacatacacacacacccccaacacacaccaaagcatatacgccaacacactcacacatacacagcaatgcattacccc

SEQ ID NO: 2374 - DNA, 131 bp, Protomyxzoa rheumatica
gttattacctgcatgcaggctggtctggaaggggctagttggccattagcaggaacagaacttgtggtttgcatctcactctctaatggtgtctactggtgaaccgatgattttaattttagtgcactttt

SEQ ID NO: 2375 - DNA, 126 bp, Protomyxzoa rheumatica
ggacatgcgcgtggcaaagcgttcactcgaagtcagatcgtcatgtatgctaagggtccggagacgctaaaacaccggcttcccgacttcatgatgacggacccggaagtgcgttcatgggttgat

SEQ ID NO: 2376 - DNA, 135 bp, Protomyxzoa rheumatica
aggaccgcatccggccagaggcccacagtgaagccgggggtctgacagtaccacggcgtgcccaggtgtggcagtgccagttccccggggcctgaaagcttcctacacaggagaatcagggcctgccaccaggtg

SEQ ID NO: 2377 - DNA, 126 bp, Protomyxzoa rheumatica
agtgtgggttgtggggggtgtgtatgtacagtgttgtgtgtatggggtgtgtacgtacagtgtgtgtatggggtgtgtacgtacagtgtgtggagtgtgtgtgtggggtgtgtatatacagtgtgt

SEQ ID NO: 2378 - DNA, 127 bp, Protomyxzoa rheumatica
ggaatggactggaatgaaatggactcgaatggaatggactcaaatggaaaggactggaattgaatggagtggaatggactcaaatggaatggactctaatgaaagggaatcaaatggaatggaatcg

SEQ ID NO: 2379 - DNA, 131 bp, Protomyxzoa rheumatica
ctagtttttctatgaacatatttcgttttctaccacaggccccaaaacgaactaaatatccatttggaaattctacaaaaggaggatttcaacaatgctctatcgagaggaaggttcaacgctgtgagttg

SEQ ID NO: 2380 - DNA, 130 bp, Protomyxzoa rheumatica
cctggggacttgtaattgtcctggcttctggaagcctccccttttccacctatgcactggggtctgaagtgtgtgcaggaggatttagacggggtcaggcacactcagagaggatgaggatgagggcagg

SEQ ID NO: 2381 - DNA, 126 bp, Protomyxzoa rheumatica
tactttgcatcgtctgttagaatttgatgtgagcacctttgctttcactcgaaatgaaaacaacgctcttgagcttgattatttaattgttgatgaagcttccatgcttgatatctttctttttta

SEQ ID NO: 2382 - DNA, 171 bp, Protomyxzoa rheumatica
accctacaaatttaataaattttggttatttgttttctctttttgacacgaatgaatttattatttttgttggaaaaatattttcattttatttggtaaataaatagtgtaaaataacttcattaattagttattaaaagcccgaaatgcaaaaataaaataaaatagatt

SEQ ID NO: 2383 - DNA, 203 bp, Protomyxzoa rheumatica
tggagtggagtggagtggaatggaatggagtggaatggaagggaatgtcatagagtggaatagagtgtaatgaaaggcagtggagtggaataaaatggagtggagtggaatggaatggaattgattggagtggaatggaatggatggaatggagtggagtggaatggaatggggtggtacggaatggaatggaatggaatgga

SEQ ID NO: 2384 - DNA, 124 bp, Protomyxzoa rheumatica
taacacaggtagtctggcccaagggtctttggtctctcgatatcagaagatgattttagcaaggactgagctattgaatctaccaattcatcaaaactaaccattctcaaaggttcagataaat

SEQ ID NO: 2385 - DNA, 152 bp, Protomyxzoa rheumatica
agactatcctgaagccagtgtcccaaagtagacgtaaaacctggcacaacagtggacttctaggtatttttatgggatttctctttctgccttcaaaccacagcagtcactggcttcaggctgacaggaggggaaaacattcaatatacctc

SEQ ID NO: 2386 - DNA, 158 bp, Protomyxzoa rheumatica
gtggtatgtatgtggtacatttgtggtgtgtttggggaggtgggcgatgtgtatgtgggcgaggtgtgtggtgtgtgtgtgttgtgtgtgttgtgtggcgtgtgtggtgtgtggtgtcaggggatatgggtatgtgtgttatgttgtgtgtgatgtgc

SEQ ID NO: 2387 - DNA, 122 bp, Protomyxzoa rheumatica
caccatcatctttatcctcatcaccatcactataaccatcatcaccatcctcatcctcattatccccatcaccatcctcatcaccatcaccatcagcaacctcatcaccatcaccatcagca

SEQ ID NO: 2388 - DNA, 127 bp, Protomyxzoa rheumatica
gaagtgtgtgtgtagtgtgtggtatgtttgtgtgccatgtgatgtgtgtttgtgtgtggtgtaggtggtgtgtgtttgtaagtggggggtgtagtgtgtttgtgtggtgtgtgtgtatgtggtgtgt

SEQ ID NO: 2389 - DNA, 133 bp, Protomyxzoa rheumatica
acacatacacaacacacacaacacacaaacacaacacatatacaacacacaccacacacacacctcacaccacacacacacatcacacacacgacacatacacaacacacacaacacacaaacacaacacata

SEQ ID NO: 2390 - DNA, 140 bp, Protomyxzoa rheumatica
atggactcgaatggaatttattggaatggttccaaatggaatggaatggaatggaatttaattgaacgcgatggaatggaatggaatttactccaatggactggaatggaatggaatcaaaaggtaaagaatggaatgga

SEQ ID NO: 2391 - DNA, 129 bp, Protomyxzoa rheumatica
tcgaatgaaatggaatcgaatgaaaaagaatggaatggaatggaagagcatgcaatggaatggaatggaaggacatgaaatggaatggaattgaatggattggactcgaatggaatagaaaggaatcga

SEQ ID NO: 2392 - DNA, 138 bp, Protomyxzoa rheumatica
tccattccaatccattccattccgctccattctaatccaccccactccattacattccactccatttagttccattgcactccactccatgcctttcaattccacaccactccactccactccattccactccactcc

SEQ ID NO: 2393 - DNA, 128 bp, Protomyxzoa rheumatica
tcatccaaacttctatagtatttgtaaagccctttagaattgtttctgttgttgttcatttctttctgctcacagaaactagccttcagtacctgactgtagatagctgttccgtgataaatttgtac

SEQ ID NO: 2394 - DNA, 141 bp, Protomyxzoa rheumatica
ttgacttcattccattccattccattccatccgattccattctattgttttccatcccattccattcttttccaccccattccattccattatattcgtttccataccattcgagtccattccactccagtccattagatt

SEQ ID NO: 2395 - DNA, 187 bp, Protomyxzoa rheumatica
cgaggtcattccattccaatttattgaattcgattccattccattcgataccattccttttgattccattgcatgcaagtgcattccattccattccactccattccattgtgttcaattccattccatgcaattgcattccatacaattctattccattccattacattccgttccattccattcc

SEQ ID NO: 2396 - DNA, 133 bp, Protomyxzoa rheumatica
cgtcctctacagccgcagccctcacttcttccacaaatacctgccgtcgatcttcgcttaataagccatgcttatgaagcgtagcgataagatcaacatccatgtcgtccttcagcggccgatttagaacatc

SEQ ID NO: 2397 - DNA, 144 bp, Protomyxzoa rheumatica
tttctcccaggaaaaaaacctccatctttacttcaaagaagatgtatgaagatcaagagaaatgttttccttttaattagtttcaaccacattttgctgactgtgtcctccaggcagctgtttctgaatatgctgcttctttct

SEQ ID NO: 2398 - DNA, 126 bp, Protomyxzoa rheumatica
aatggaatggactggaatgcaatggtctcgaatggaatggaatcaaacggaatggactcgaattgaatggaattgaatggaatggaatcaaacagaatggaatcgaatggaatggaattgaatgga

SEQ ID NO: 2399 - DNA, 143 bp, Protomyxzoa rheumatica
tattctaatttgatagtaaagaaataaaggctccaaaaatttgagacttttacatgataacatttcaaataatttgcagagacaagattttcaaaacacatctgtatctatgatactttcatttaacagacttttcttggatg

SEQ ID NO: 2400 - DNA, 140 bp, Protomyxzoa rheumatica
aatggaatggaatgaagtggggaagaatggggtggacaggagtggagtggagtgtagtggaatataatggaatggagtggagtggattggagtatagtggagtggaattgaagggtgtagagtggaatggaatgaaatgg

SEQ ID NO: 2401 - DNA, 249 bp, Protomyxzoa rheumatica
gactcgaaaggaatggcgtggaatggacacgagtggaatggaatggactcgaatggattggaatggaatggacacgaatggaatggaattgagtggaatggaatagaatggaatggagaggaagggaatggaaaggaatggaatggaaaaggaatggaatggaattccacagaatggactggaatgtgttagaattgaatggaatggaatggtctcgaatgcattggaatggactcgaatggaatggaa

SEQ ID NO: 2402 - DNA, 150 bp, Protomyxzoa rheumatica
ttccattccattccacagcaatccgatccattacacttaactccactccattccactacgctccactccattccgttacgttccattcctttccgttccattccattcctttgcgttccattccattccattccattccattccgttcca

SEQ ID NO: 2403 - DNA, 239 bp, Protomyxzoa rheumatica
ggagttgagtggattagaatcaaatggaatggcatctaatggaatggagtggattggaatggaatcgaatggactcagacggaatggacttgaatagaattgaatggaatggcatcgaaaggaatggaatggaatggaagggaaacaaatagaatggactcgaacggattggattggatcaaaatggaattgaacggaattgaatcggacagaatggaatgaaatggaatggacttgaa

SEQ ID NO: 2404 - DNA, 196 bp, Protomyxzoa rheumatica
ccactccactccggtcaaatcccttccttcccattccattccactccattccattccaatacattctgttccattccattccagtccattccattccattccactccattgaagtccaatccattccacttcaccgcattccattcgattccatttgatgtcatttgattccatttgatttgattccattcgaatc

SEQ ID NO: 2405 - DNA, 132 bp, Protomyxzoa rheumatica
agtcgatgtgggacattgaacacacatcatttccattaattgggtaatatatgtccgtttttttaattttgaatcacaatatagggagaaaaagattgagtttttcataactttatatattataggatgatt

SEQ ID NO: 2406 - DNA, 132 bp, Protomyxzoa rheumatica
atggatgtttatgtttgttcacacattcacaagctggataattattcaaaagctaagaagttacgatactattagttaaaataataagaatttgttgcaagtggggttttagaaaagtgttttcacgaatta

SEQ ID NO: 2407 - DNA, 125 bp, Protomyxzoa rheumatica
gatcatgcactgatcaggtgactgttcatgcaatgatcacgtgcctgatcatgcactgatgacgtggctgatcatgtactgatcacgaagctgatcatacaatggtcatgtgactgttcatgcac

SEQ ID NO: 2408 - DNA, 149 bp, Protomyxzoa rheumatica
gagtggagtggagttgagtggagtggatcggagtgcagtgcaatggaatggaatggagtggagtggagtggacaggaatttaatggaatggagtggattggaatggtgtggattggaaaagaatggaatggaacagaaaggaatggaat

SEQ ID NO: 2409 - DNA, 123 bp, Protomyxzoa rheumatica
cacatctcaccacaccacacctcacctcacaataccacatctttcatcttaaaataccacacctcatctcacaagaccacaccacaccacgccacaccacatagcaccacagcaacacacaat

SEQ ID NO: 2410 - DNA, 143 bp, Protomyxzoa rheumatica
aatggaatcgaaaggaatggaatcaattggaatggattcgaacgacatcgaatggaattgaaaggaatgtggtgaagtggagtggaaagaaatggagtggaaaggaatggggtggaatggaattgaatggagtggagtggagt

SEQ ID NO: 2411 - DNA, 129 bp, Protomyxzoa rheumatica
cctccatccatgggattttccaggtggagtactggagtgggtgccatcgccttctccatgcaaagatgagaacaatgtaaaacaaaacaaactagcaaaagttctccgtgagagctgacaggctgtgta

SEQ ID NO: 2412 - DNA, 147 bp, Protomyxzoa rheumatica
cattccattacaatccataccattccgttccactaaactccagtcaattccactccactccactccactgcactccattccatttcattccattctaaatccattccaatatattccattctaaatccattccattatattccattc

SEQ ID NO: 2413 - DNA, 132 bp, Protomyxzoa rheumatica
aaattctgataaactcgtaacatacttaaacctgtataatcaaataatatataatcgttttaatattcataaacaaaaactaaataaaaaaagacaactaaagagttaaaacaatatatatatatatatatc

SEQ ID NO: 2414 - DNA, 213 bp, Protomyxzoa rheumatica
caatggaatggaatcggatggaacggaatggaaaggaatggtgtcgaatggaatagaatcgaatggaatggcattgaatagaatggaatggaatgtactcgaatttaatggactggagtgaaatgaattcgaatggaatggactggagtgaaatgtattcgaatggaatggagtggagtggaatggactcgaatggaaaggaaacgagtggaa

SEQ ID NO: 2415 - DNA, 122 bp, Protomyxzoa rheumatica
tgtacgtgtagtatggtgtgtgtgtggtggtgtgtgtgatgtatgttgtatatggtgtgtgtggtgtggtatatgtggtggggcatgtgtgtgttgtggtgtgtgttgtgtgtgtggtgtgt

SEQ ID NO: 2416 - DNA, 132 bp, Protomyxzoa rheumatica
cgaattgaatggaaccaaatggaatggaatggaatggatcagaaaggaatagattagaatggaattggatggaatggaatggagtcgaatggaatagaatcaaatggaaagccatcgaatggaatgaaattg

SEQ ID NO: 2417 - DNA, 144 bp, Protomyxzoa rheumatica
attccattcgattccattccattccattccacaccattccttttgagtccattccattccattaaattgaagtccatttcattcctttatattccattccattcgagttcattccattctgttactttccattatattcgagtc

SEQ ID NO: 2418 - DNA, 168 bp, Protomyxzoa rheumatica
aatggaatggaatggagtggagtggagtggagtggagtggtgtggagtggagtggagtggaatgtagtggtatggattgtcatggaatggaatggaaaggagtgaagtggagtggggtggagtggagtggaatggagtggcaaggaatgggatggaatggagtggagt

SEQ ID NO: 2419 - DNA, 124 bp, Protomyxzoa rheumatica
ggttgagctgttttgtgtattctgtgttatgtggtatatggaatttgctggtgggtgtgttgtggtgtgcgtgcgtgtgtatcttcttcgttctacgttttgcgtttgggtgtgtggtgtggtg

SEQ ID NO: 2420 - DNA, 156 bp, Protomyxzoa rheumatica
gtttatcgtcggcaagcaccgatgatcccgtaacggacacgcccctcgagacacatcagttcgcgcgagggcatcgacgttccttacggagcgcaaggcctgtcattagttgcggcgccaaacgcgtagtgtccagcctggaattagcgcaccatt

SEQ ID NO: 2421 - DNA, 219 bp, Protomyxzoa rheumatica
ttccattctattctagtccattccattccatttgattccattggagtccattccaatctattcctttcgagtccattccattcgaatccattccattccattgaattcgagtccattccattccatgctattccatttgaatccattccattcaattccactcgaatccattccattccattccattcaagcccaattcatgcatttccattcaattcc

SEQ ID NO: 2422 - DNA, 163 bp, Protomyxzoa rheumatica
tgcaatgcaatgtaatagactcaaatggaatggaatggaatggaatacacacgaatggaatagaatggaatggaatggactggaatggactctaatggaatagaatagaatggaactgaagggaatcgaatgaaaaggacgaatggactgaaatggaatggaa

SEQ ID NO: 2423 - DNA, 127 bp, Protomyxzoa rheumatica
cgtggctgatcatacactgatcacgtcgctgatcatgcactgaccacgtggctgatcatgcactgatcccatggctatcatgcactggttatgtggatgatcatacatggatcacgtgcctgatcat

SEQ ID NO: 2424 - DNA, 169 bp, Protomyxzoa rheumatica
tccaatcaagtccactccactccacttctctcccctccactccactcctttccattccaacccattccatttcactcaattcctctccactccagtccagtccactccaatccactccattccatcccattcaattccactccattccactccattccactccacttca

SEQ ID NO: 2425 - DNA, 163 bp, Protomyxzoa rheumatica
gaaaatatatgaaaataacaaaaataaccaaaatatctaaaaatattcatagaaaaataaccggatggatattaaattttaaaaaagcaaaagaaccaaaaccaaaccaaaccgaaccaaaatttcaaaataaccaaatggatactatactttataaccgaat

SEQ ID NO: 2426 - DNA, 143 bp, Protomyxzoa rheumatica
gttgatgtaaatagtgtctgggctctgcctaccggggcgttttcacatgtcactgaactgatgacaaaggtgatgtaacactagcctaggctttgcctacaggggatattgtgacatacctctgcagtgatcacccaggtgat

SEQ ID NO: 2427 - DNA, 173 bp, Protomyxzoa rheumatica
caccagaccccaccccatcccactccagtccattccattccattccatttcattccatttcctttcattacaatacattccactgctttcccttccattacactacattccattctaatccagtcctttccacttcattccactccattccattcctgtccactgccccactc

SEQ ID NO: 2428 - DNA, 150 bp, Protomyxzoa rheumatica
tgtatacctatatgcaaaacatatatatatatatgtatacacacatacacacacacacccagacttgttctaatagtctatatccacaaccagatttttaaaaatcacaaaactaacattctggaaaatcatattgtgtcaccaatggtg

SEQ ID NO: 2429 - DNA, 149 bp, Protomyxzoa rheumatica
cctcgaatagaatcaaaaggaatcatcaaatgaaatcgaagggaatcatcatccaatggaatcgaatggagtcatcaaatgaaatcgaacggaatcatcatccaatggaatcgaatggaatcatcggatggaatcaaagcaatcatcat

SEQ ID NO: 2430 - DNA, 221 bp, Protomyxzoa rheumatica
ggagtggaatggaatagagtggaatggtgtggattagagtggagtggagtgaagtggagtggaatggagtggaatggaatggtgaaatgaaacgtgagatgagattgtgctactgcactccagcctgtatcacagagtgagatcctgtcgaaagaagggaatggaatggtgtggaagggaatagaaagagatggagtggaatggaatggaatggaatggaa

SEQ ID NO: 2431 - DNA, 646 bp, Protomyxzoa rheumatica
ttccattccattccactcctttctattccactacaatccataccactccactacatttctctcatttccattccattacagtccactcgactccactccagtacactccattcaattccattctgctccattacattccagtccactccattcatttccattccattccaatccattccactccattacactccactccactacactacacttcattccattccactccaaaccattacacaccactccactacaatccattctactccactacactccattccattccattccatccctttccactctaccccacaccactccactccattccattccactccactccattccattgcaatccattccattccattccattccactccactctgaaccactccactcaactccactgcattccactccactccacttagttctgttgtttctttccattccgttcctttacattccatttcattccattccactccactctgaaccactccacttaactccacttcattgctgtccactccactcagttcctttctgtttctttccattccattcgattccattccattccgtttcattccattccattccaatccccttcattccattgcagtccacatcactc

SEQ ID NO: 2432 - DNA, 391 bp, Protomyxzoa rheumatica
gaatggaatggagtggaatggaatggagtggaatggagtggagtggagatgagtggagtagaatggagtggagtgcaatggaggggtacggagagcaatggaatggaatgtaatggagtgaaatggaatggaatggagtggaatgaaattgagtggagcagagtggagtggagtggagtgaagtggattggagtggaatggagtggaatggactgtaatggaatggagagaattggaatgaaatggaacggaatggaattgaatgtaacggaatggaaagaaacagaaaggaactgagtggagtggactggaatgcagtggagttgagtggagtggttcatagtggagtgcagtggaatggaatggaatggaatggattggaatggaatgg

SEQ ID NO: 2433 - DNA, 143 bp, Protomyxzoa rheumatica
gagtggagtggaatggagtggagtggagaggaatggaatggactggagtgtaatggaatgaagtggaggggaatggaatgcagtagagtggaatggaaaggaatggagtggagtggaatggaatggagtggagtggaatggaa

SEQ ID NO: 2434 - DNA, 144 bp, Protomyxzoa rheumatica
atggaatcaacccgagtgcaatggaatggattcgaatggattggaatggaatggattcaataagaatggaatggaaaggaatggaatcaacccgagtgtaatggcatggaaaggaacggaatggaatgggatggaatggaatgg

SEQ ID NO: 2435 - DNA, 226 bp, Protomyxzoa rheumatica
cattccattccattccattctattccactccattccatttcattcgactccactccattccactcaactccactctgctcctcttcattaaattccattccattcaactccattcaattcctgtccactccattccattccactccactccattccaatccaccttataacactacgttatattccattctactccattactttccacgccactccactccactcc

SEQ ID NO: 2436 - DNA, 184 bp, Protomyxzoa rheumatica
ttcctttcaattccactcaattgcattccactccactccagtccactccactccatttcactccattccactcctatatactccactccactccaatccactccactccactccattacattccactccattcttctccattcctctccattccattccattccattccattccattccattcc

SEQ ID NO: 2437 - DNA, 144 bp, Protomyxzoa rheumatica
attccattccattccactccatttcattccattcctttccattccactcccctcctttccatcccattccactccattgcattccattccattgaattcccttctattccactccactccactccattccattccactccagtc

SEQ ID NO: 2438 - DNA, 175 bp, Protomyxzoa rheumatica
ggagtggtatggagtggaatggaatgcgatggaatggaatgaagtggagtggagatgaaaggagtggactggaatggaatgtagtggaatggaatggaatgaagtggagtagagtgcagtggagaggggtgaagtggaaacgaatggaatggaatggaatggagtggagtggagt

SEQ ID NO: 2439 - DNA, 236 bp, Protomyxzoa rheumatica
gacagagtgagacccggtctccagataaatacgtacataaataaatacacacatacatacatacatacatacatacatccatccatacagatatacaagaaagaaaaaaagaaaagaaaagaaagagaaaatgaaagaaaaggcactgtattgctactgggctagggccttctctctgtctgtttctctctgttcgtctctgtctttctctctgtgtctctttctctgtctgtctg

SEQ ID NO: 2440 - DNA, 281 bp, Protomyxzoa rheumatica
ccattccattccattccattccactgcactccactccacttaattccattccattccattccactccattccactatacttcattccactccactatactccactccactccactatactccactccactccactgtactccactctactccactatactccactccactcgacgccactctactccactccattccattccattcctccccactccactcaactcccttccactccactcctccccattccattccattccatccctttccattccactc

SEQ ID NO: 2441 - DNA, 323 bp, Protomyxzoa rheumatica
aatgcaatggaagggaatggaatcgaatggaatggaatggaatggcattgaatggaatcaacacgggtggaatggaatggaatggagtggattggaaagttatggaatcaacccgaatggaatgtaatggaatggaatggaatggaatgcagtggaattaacccgagtggaatggaatggtatggagtgaaatggaacggaatggaatggtatggaatggaatggaatgaaaaggaaaggaaagcaatggaatcaaaacgagtggaatggaatggaatgtaaagaaatggagtggaattctatagaatcaacacgagtggaat

SEQ ID NO: 2442 - DNA, 163 bp, Protomyxzoa rheumatica
acataaaatatcaaagtacccaaaatatgtattatatactatagataaaatatcaaagtgccccaattatatattatatactgtatataaaatatgaaagcacccaaacatttataataaacttaacatttaatatcaaagtactcaaactatatactgtaca

SEQ ID NO: 2443 - DNA, 295 bp, Protomyxzoa rheumatica
tccattccattgtattccattcaattccattccattgcattccattccattccattcgtttccatttcattctaattcattccgctcaagtccattccattcgagtccattcccttccagtccattccaatagagtccattgctttccattccattcgatatcttcccattacagtccattccattctattcctttggttcccattcaattcaattccatttgattacatttcatttgattacattccattcgactccattccatttgagtccattccattccagtccattccat

SEQ ID NO: 2444 - DNA, 131 bp, Protomyxzoa rheumatica
cattcgatgatgattccattcgatttcttttgatgattccattggattctattcaatgattattccattcttttccattcaatgattccatccgattccattcaatgatgattccattcaattccattcga

SEQ ID NO: 2445 - DNA, 315 bp, Protomyxzoa rheumatica
gagtggagtaaagtggattggagtagaatgtaatggtgtggaatgcagtggaatggagaggagtagaacggaatggagtggagtggaataaaatggagtcgaatggaatagaatggaatggtttggagtggaatggaatggagtgtaggggaattgaatggagtggagtggaatggagtggaatggaatggagtggcatggaatggattggaatggagtggaatgtaatggagtggaatggaatggagtggagtggaatgtaatggagaagaatgaaatggaatggaacagagtggaatggaatggaatggagtg

SEQ ID NO: 2446 - DNA, 159 bp, Protomyxzoa rheumatica
ccaatccccttcattccattgcagtccacatcactccactacactccattctattccactccacaccattccactccactccactccacaccattccactccactacactccattccattccattccattccattccactctactccacaccactccac

SEQ ID NO: 2447 - DNA, 180 bp, Protomyxzoa rheumatica
ggaacggaatggaatggattggagtggagtggagtggagtggattggagtggaatggagaagaaatgaatggagtggagtggaatggaatggaatggaacagaaagaaatggaatgaaatggaacggcatggaatggaatggaacagaatggagtggagtagaatggagtggagttgagt

SEQ ID NO: 2448 - DNA, 141 bp, Protomyxzoa rheumatica
atgccattccactcgggttgattccattccactccattccattcgggttgattccattccattccattccattccattccactctattgcattccattccactccaactggatttattccgttccattccattccattcca

SEQ ID NO: 2449 - DNA, 158 bp, Protomyxzoa rheumatica
acacacacacacacacccccacagagagagagagacagagagagagacagagacagacagagagacagagagaaagagacagagagagaaagacagacagagagaaacagacagaaagagagacacagacagagacagagaaacagccgacagggggg

SEQ ID NO: 2450 - DNA, 148 bp, Protomyxzoa rheumatica
gtgcatgatcagtcacgtgatcagtacatgatcagtcacgtgaacagtgcatgatcatttacgtgatctgtgcatgatcagtcacgtgaccagtatatggtagctacgtgatcattccatgacgagccacgtgagcagtgcatgatag

SEQ ID NO: 2451 - DNA, 284 bp, Protomyxzoa rheumatica
aatagaactgaatcaaatcgagtggaatggaatggaatgaaatggaacgaaatggaatggaatggaaaagaatggaattgaatctactggaatggaatggaatgcaatggaatggaatacaatggaattaaatcaactgggatggaatggaatggaatggaaaggaatgaattacaatagaattcaatcaactgcaatggaatggaatggattggaatggaatggaaagcaatagaatggaattgaatcaacccgagtagaatggaatggaatggaatggaatg

SEQ ID NO: 2452 - DNA, 123 bp, Protomyxzoa rheumatica
tggaacagactcgaattgaattgaatggaatggaaaggaaaggaatggaatgaaatggaatggaatggaatggaaagaacggaactgaatgaacccgagtggaatggaattgaatggaatgga

SEQ ID NO: 2453 - DNA, 106 bp, Protomyxzoa rheumatica
tggaaccgaatggaatggactggaacataatggaatcgaaaggaatggaaaggaattgaatgcaatggaaagcaatggaatcgaatgtaatggagtcgtatgtagt

SEQ ID NO: 2454 - DNA, 236 bp, Protomyxzoa rheumatica
gaatggaatggagtggggtggagtggagtgcagtggagtggaatggagtggaatggagtgaaatgcagtggagtggaatggggtggaatggagtggagtccagtggaatggtatggaatggaatggaatggagtgaagtggaatggagtggaacggaatggagtggagtggagtggagtggaatgaaatagagtggaatggaatgggatggaatggaatactatggaatggtgaaa

SEQ ID NO: 2455 - DNA, 184 bp, Protomyxzoa rheumatica
tgcaaagggaatggaatcgagtggaatggaatcgaatgaaaagcaatcgaatggaagggacgggaatggaatggagtggaatcgaatggacttgaatggaatggattgcaatggaacggactcaaaatgaatggaatcgaatgaaatggaaatgaatggaatggaatggaatggaatggaacgg

SEQ ID NO: 2456 - DNA, 160 bp, Protomyxzoa rheumatica
tcctttccaatccattccattccactacattccattccactctactccactccattccactctatttcattccattccattctattatattcttctcctctccactccattccattccattccaatccattatatgttcttctcctctccactccattcc

SEQ ID NO: 2457 - DNA, 145 bp, Protomyxzoa rheumatica
ggttgattccattccattcaattccgttcaattccgttccgttccattccattccattccattcctttccattccaattcattccattgctttccactccggttgattccattccattccattccatacccttcgggttgattcc

SEQ ID NO: 2458 - DNA, 144 bp, Protomyxzoa rheumatica
atggaatggaatggaaaggaatggaatggaatcaacccgagtggaatggaatggaattgaatggaatataatcaacccaaaaggaatggagtggaatggaatcaaaccgagtggaatggcatggaatggaatggaatggaatgg

SEQ ID NO: 2459 - DNA, 110 bp, Protomyxzoa rheumatica
attccactccactccattccactccactccactccactcccctccacttcactctgttccattcaactttactccattccattccattccactccactccatttcactcc

SEQ ID NO: 2460 - DNA, 217 bp, Protomyxzoa rheumatica
aatggaatgcactcgaatggaatggaatggaattgactcgaatggaattgaaaggaatggactcgaatagaatggaatggaatgggctcgaatgcaatggagtgaaatggactcgaatggaatggaaaggaattaaatggactggaattgaatggaatgcaacagactcgaatggaatggaatggaaaggtcacgaatggaatggaatggaatggaa

SEQ ID NO: 2461 - DNA, 123 bp, Protomyxzoa rheumatica
tgtgtctgtcttctgtcttattctctttctctctctgtctctctctctctctcccttcctgtctgtttctctctctctctttatgcctgtttctctctgtctgtctctgtctttctctgtctg

SEQ ID NO: 2462 - DNA, 219 bp, Protomyxzoa rheumatica
gtggagcgtaatggaatggaatgcagtggaatggaatggaatggagtggaacagagtagagtgaaatggaatggagtggaacggagtggagtgaaatggaatggagtggaacggaatggagtggaattgattggagtgtagtggagtggaatggaaaggaatgaaatggagtggagcgtaatggaatggagtggaacggaatggagtggaattgattgg

SEQ ID NO: 2463 - DNA, 145 bp, Protomyxzoa rheumatica
agtgcattccattccattccattccactcgagtcgtttcctttccattccattcaagtccattccattccattggagttcattccattgaattccattcgagacaattccactgtattccactcgaatccattccattccattcc

SEQ ID NO: 2464 - DNA, 155 bp, Protomyxzoa rheumatica
aatggattggaaaggaatggaacggattggaatggaaaggaatggattgaacccgagtggcatgtaatggattttaatggagtggaatgcaatggaatggaatcaacacgaaaggaaaagaaaggaatggaatggaatggaatggaatggtatgg

SEQ ID NO: 2465 - DNA, 360 bp, Protomyxzoa rheumatica
aattcctttccattccattgcattccattgcattccattctattgcattccattccattgcaatccattccattcaattccattccaacccattccattgcattcctgtgaactccaatccactccactccactgcattccattccattccattccattccactcctttccattccattctactccactccattccgctctactccattcaactctactcctctccactccactgcattccattccattccactccattccatgccattccattccactccattccagtccactccattccactctactccattccactgcactccactccattccattccattctactccattccattc

SEQ ID NO: 2466 - DNA, 156 bp, Protomyxzoa rheumatica
cttctataccattccattcctctccattccactcgtgttgaatcctttccatcccattccattccattccattcagttccatttattccactctggttgattccactccattccattccattgcgttccataccattccattgcattccactcggt

SEQ ID NO: 2467 - DNA, 96 bp, Protomyxzoa rheumatica
gtgttcatttggagagctttgttgcctgtggtggaaaaagaaatgtgttcacatacaaactagaaagaagccttctcagaaactcctttgagatgt

SEQ ID NO: 2468 - DNA, 180 bp, Protomyxzoa rheumatica
gaatggaatggaaaggaatggactggaatggaataaattgcagtggaatggtatggaatgcaaagtaatataatgaaaatgagtggaatccaccaaaatggaaaggaaaggaatggaatggaatggaatgaatggaatggattggaaaggaatcaacccaagtggaatggaaaggaatgg

SEQ ID NO: 2469 - DNA, 246 bp, Protomyxzoa rheumatica
tccattccactccactccattccactccactccactccatcccactccactccactccatcccattcctttccaccctactccactccactccattccattccattccaatccattccatcccattccattccactcccttccactcgaatccactccattccactccactccagtccactacactccattccatcccatcccattgcattccactctattcctctccaccccactccattccatt

SEQ ID NO: 2470 - DNA, 165 bp, Protomyxzoa rheumatica
gtggaatggaatggaacgtaatggcatgagaaagaatggaattgaccggagtggagtggggtggaaaggagtggagtgaaggggaatggagtggagtggagcagagtggagtcgaatggaatggactggagtggagtggagtagagtggaatggaatggactgga

SEQ ID NO: 2471 - DNA, 152 bp, Protomyxzoa rheumatica
cattccattccattccaatccattccactccattccattccactacactcgattccattccattccactccactcccttccattctaatccattccattctattccttttccttcccttccattccattcgattcgattctattccattcca

SEQ ID NO: 2472 - DNA, 279 bp, Protomyxzoa rheumatica
atggaatagaatggaatggattggaatggaatggaatggactcaaacgcaatggaatgtactcaaatggaatggaatggaatgcaatggaatggactcgaatggaatagagtggaatttactggattggaatctaatggtatggactctaatgcaatggaatggaatggactcgaatggaatagaatggaatggaatgaactcgaatggaatggaatggacatgaaaggtatggaatggaatgggatggaatggaatggactggaatggaagggaatgg

SEQ ID NO: 2473 - DNA, 153 bp, Protomyxzoa rheumatica
tggattgtagtggaatagaaaggagtggaatggaatggaacggaaaggaacagattggagtggagtggattggagtggagttgagtggagtggatcggagtggtgtggaatttaatggaatggaatggaaaggaatggaatggagtggagtgg

SEQ ID NO: 2474 - DNA, 134 bp, Protomyxzoa rheumatica
ctcactgtgtctgtcttctgtcttattctctttctctgtctgtgtgtctctctctctcccttcctgtctctttctctctctctctctctttctgtctgtttctctctgcctgtctccgtctttctctgtctgtc

SEQ ID NO: 2475 - DNA, 179 bp, Protomyxzoa rheumatica
gtactacaaatatatatattatatatcatatatgatatagcacctttgttatatatcataatacatacaaatgtgtattatgttatctataattgtaaaatttcatatataagatgtataatgtgtattatatattatatatgttatgtaatatatgtagtatatataagatgacacag

SEQ ID NO: 2476 - DNA, 366 bp, Protomyxzoa rheumatica
tattcaattcccttacactccatttcattccattccattcaggttgtttccattccattccaatccattccactccattccattgcactcgggttgattgcattccattccattccattctattccatttccttccattccattctattcggtaccattccattccattccattccaatccattccattccattccaggtgattcctttgcattccatcatgttccattccattcctttccattccattccactcgggttgattccatcccattgcattccattctgttcctctcgggttgattccattccattctattccattttattccactcgagttgattccattccattccattccattcc

SEQ ID NO: 2477 - DNA, 168 bp, Protomyxzoa rheumatica
atggagtggagtggagtggaatggaatggaatggaatcaacccgagtggaatggaatggaatgtagttaatggaatggaatagaatagattggtatggaatcaacccgacaggaatggtatggaatggaatgcaatggaatggaatggaatggaataaaatggaatgg

SEQ ID NO: 2478 - DNA, 232 bp, Protomyxzoa rheumatica
tggaatggaaaggaatggaatggaaagaaatggaatggaatcaacacgcttggaatggaatggatcggaatggaatggaacggaaaggaatggaatggaatggaatggattggaatcacccctagtggaatataatggaatggaatggaagggatggaatggaattgaatggaatggactcaatccgcgttgaatggaatggaatggaatggaatggaatcaacacgagtgg

SEQ ID NO: 2479 - DNA, 346 bp, Protomyxzoa rheumatica
attccattccattccattccagttgattcaattccattctgttccattcggatccattccattccatacaattccattccattccattccaattgattccattccattcccttccaatccattgcattccattccattccattacattccactccactcggattgatacaattccattctattccattccattccattccatttaattccattccattccattccattgctttccattccacttgggttgaattcattccactgcattccattccattccattccactacattccattcctttcctttgattggcattgcattccattccattccattccattcca

SEQ ID NO: 2480 - DNA, 133 bp, Protomyxzoa rheumatica
ggaatagaatggaatgaaatggaatggaatggaatggaataaaccaaagtggaatggaatggaatggagtggatggaatggaatgggttgcaatggaatcaacccgagtggaatgtaatggaacggaatgcag

SEQ ID NO: 2481 - DNA, 140 bp, Protomyxzoa rheumatica
tggaatggaatggaatggagtggagtggaatggaatggaggggaaagaaacggaatggagtggagtggaatggaaaagagtggagtggaatgaagtggagtggagagtaatggagtggaatggaatgaagtggagtggaa

SEQ ID NO: 2482 - DNA, 205 bp, Protomyxzoa rheumatica
tgagaccgtacctttgcaatccattccactcgagtccattccattcaactccattccattcgtttccattccaatagattaccttccattcgattgcattccattcgagtccattccaatggagtccattccattcgagtccattccattccaggacattccattagagtccattccattcgagtccattccattccagtgcatt

SEQ ID NO: 2483 - DNA, 174 bp, Protomyxzoa rheumatica
ccattccattccacttcactccactccattccattccatttcatgccgtggcattccattccattccattccactgcactccgattaactccacacaactccattccattccactccacaacactccgttctgttccgttccattctcttccattccattccattccattccat

SEQ ID NO: 2484 - DNA, 186 bp, Protomyxzoa rheumatica
tccattccaatcctttccattgcactcgggttgattcctttccattgcattccatttcattcctttccattccattccgttccactcggtttgattccattcctttgcgttctatttcattccataccattcctttcgggttgattccattccatttcatttcattccattccattatggttaatt

SEQ ID NO: 2485 - DNA, 145 bp, Protomyxzoa rheumatica
gaacggaatggaatggcatggaatggaaggtaatggaatggattggaattgaatggaatgcaatggaaggaaatggaatggattcgagtggaatggaaggcaattgaatgaaacggaatggaatggaatggaatagaatggaatg

SEQ ID NO: 2486 - DNA, 183 bp, Protomyxzoa rheumatica
taccactcgggtttatgccattccattccattccattccattccttgccattgcattccattccattgcattccattggtgttgattccaatccattacaatctgttccattccattacattccactcgagtggattccactgcattccattccattccattccattccattccattccattc

SEQ ID NO: 2487 - DNA, 150 bp, Protomyxzoa rheumatica
atggactggaatggaatggaatcgaatggaattgaaagtaatggaacgaaatgcaatcaaatggaatcaaatggaattaaatggactggaatggaatagactggaaagtaatggactggaatggaatggaatcgaatggaattgaaagta

SEQ ID NO: 2488 - DNA, 212 bp, Protomyxzoa rheumatica
agagacagagagagagagacagagacagagacagagagaaggagacagacagacagagagagagagagacagacagagagagaaagagagaaacaggcagagagagagagagagagcgagagagaaacagaaagggagggagagagagagagacagatagacagacggacaggcagagaaggagagtaagacagaggacagacacagtgaga

SEQ ID NO: 2489 - DNA, 240 bp, Protomyxzoa rheumatica
cattccattccattccaatctattcctttccactacactacactctattccactccactccactccactctgctccactccattccattccattaaattatattccagtccattccaatctattccactccactccactccactcggctccactccattccattccattaaattctattccagtccattccacaccattccactccattccactccactccactccattgcactccattg

SEQ ID NO: 2490 - DNA, 170 bp, Protomyxzoa rheumatica
taattccactccactccatccagctgcagtccttctcattccactccattccactccacctcattccactccaatccactccactccattgcactacattccactcaattacattccaattcattccattccattccactctgctctattccattccaatccagtacatt

SEQ ID NO: 2491 - DNA, 334 bp, Protomyxzoa rheumatica
agagagagagagagagacagacagacagacagagagagagagaccgacagagagacacagaaaaagaaagagagaggcagacagacagagaaagagacagacagagaaagacatagacagacagagagagacagaaacagacagaaagagatagagagagaaacagacagggagggagtgagagagagacagacggggagagaaagagagtaagatagaagacagacacagtgagacaggcagagagggagagagagggacaaagacagagacagaaagaaagaaagagacagacagacagacagagaaagagacacagagagaaagacagaga

SEQ ID NO: 2492 - DNA, 133 bp, Protomyxzoa rheumatica
attccattacattccattcgacttcattccattccactgctctccattccatttcactccattccatttccattccattccactctgttgcattccattccattccactccactctgtacaactccattccat

SEQ ID NO: 2493 - DNA, 136 bp, Protomyxzoa rheumatica
caattccatttgattctctttcattctattttattccattccatttgattgcattgcattccattccattccgtttgattccagtccattcaagaccgttccattccagtccattgctttcgagtccattccattc

SEQ ID NO: 2494 - DNA, 209 bp, Protomyxzoa rheumatica
ggaatggaattcagttaaaaggaatggagtggattggaattcagtggaatagaatggaaaggagtggtgtggaatggaatggaatggagtggagtggatttgaatgaaattgaatggaatggaatgcaggggagtggagtggagtggaatggaatggagttgagtggagtggagaggagtggagtgaagtggatcggagtagagtgtaa

SEQ ID NO: 2495 - DNA, 123 bp, Protomyxzoa rheumatica
ggaatggaatggaatggaatggaatggaatggtatggaattgaatcaactggaatgcaatggaatggaatggattggaatgacatggaatcaatggaatgcaatcaacccgagtggaatggaa

SEQ ID NO: 2496 - DNA, 125 bp, Protomyxzoa rheumatica
ggaatggagtgaaatggaatgggatggaatggaaaggagtagagtggagtggagtggaatttattggagtggagtggaatggggtggaatggtatggaatggagtggaatggagtggaattgtat

SEQ ID NO: 2497 - DNA, 127 bp, Protomyxzoa rheumatica
tggaatgcaatggaatgtaatggaatagaatggtatggaatggaatagtatggaaaggaatggactcgaatggaacggaattgaatggaatggactcgattggaatggatggatttgaatggaatgg

SEQ ID NO: 2498 - DNA, 211 bp, Protomyxzoa rheumatica
tggactggaatggaatggaaacgaatggaatggactggagaggaatggactcaaatggaatggaatgaaaggaatggaatggaatggaatgtaaaggaatggaattgaatggaatcagatggaatggaatggaatggaatggaatggactcaaatggaacgaaaccgaggggaatggagtcaaatggaatggaattgaatggaaatgaaag

SEQ ID NO: 2499 - DNA, 144 bp, Protomyxzoa rheumatica
ttcaattccattctattccattcacttccattgcattccactcaattccattccattctattccagtccgttcatttcctttccattcaattctattcccttcgactcgtgttgattaaattccattctattccaccccattcc

SEQ ID NO: 2500 - DNA, 234 bp, Protomyxzoa rheumatica
gttgattaaattccattccattccattccattccattccaattgattcaattccattctatttcatgtcactccattccattgcattccatttgtttccatttcattccattccactccacatgattcatttccattctattccactccattccattccaatccattccagttgattcaattccattctattcaatttcattccattccattccattccattccattccattcc

SEQ ID NO: 2501 - DNA, 128 bp, Protomyxzoa rheumatica
tagaatcctttccattggtatcaattccattcgagtccattccatttcagtccattccttttgactgcattccattccattccattccattcttatccattccatttgattacattccactccaatcc

SEQ ID NO: 2502 - DNA, 256 bp, Protomyxzoa rheumatica
cattccattccattccattccattccatttcattccattccgttgcactccattccactcgggttgattccattccattccattccattcctttccaatcgcgttgaatccattccattcctttccattccattccactccattccatgccattacattccactcgggttcattccattcaattccattgcattcaattccattccattccttttgattccacctggcttgattcctttccattgcattccattac

SEQ ID NO: 2503 - DNA, 175 bp, Protomyxzoa rheumatica
attccacctggcttgattcctttccattgcattccattactttccatgctattccattcgattgcattcgattccattccattccaatccattccattcgattccattccactcctttccattccacttgggttgattgcattccattccattctattccattccactcgggttg

SEQ ID NO: 2504 - DNA, 124 bp, Protomyxzoa rheumatica
gtacagtatacaatatatagtatcagtactttgatattttatgtactgtataaaatatatacatttggtactttgatattttacgtacagtttatattttgagtactttgatattttatgtaca

SEQ ID NO: 2505 - DNA, 198 bp, Protomyxzoa rheumatica
ttcatttcattccattccattcaatgccattcaaattgactccattccattccattccgttctatctgattccattccattttattcctttgcattccattccattcctttccaatccattccaatcttctccattccactccagttcattccatttgagtccattccattacagtccattccattcgagtccattcc

SEQ ID NO: 2506 - DNA, 151 bp, Protomyxzoa rheumatica
atggaatggattggaatggaatgtagtgaaatgaaatagactggaattgattcaagacgaatggaatggaatggaatggaaaggaacggaatggaatgcaatacaatggaattgaatcaaaccgagagcaatggaatggaatggaatggaa

SEQ ID NO: 2507 - DNA, 159 bp, Protomyxzoa rheumatica
atcaactcgagtggaaaggaatggaatggaatggaaaggaatggaaggaaatcaactcgagtggaatggaacggaattgaatggattggaatggattgcaatggaatgaaatcgaatgcaatggaatggaatcaatcattccgagtggaatggaaggga

SEQ ID NO: 2508 - DNA, 186 bp, Protomyxzoa rheumatica
atggactggaatggaacggacttgaatggaatggactggaatggaatggattgatcggaatggactggagaggaatggaatcgaatggaaaggagtggagtggactttactcgaatggaatggaaacgaatagaatggaatggaatggactttaaaggaatagaatggaacggaattggatagaat

SEQ ID NO: 2509 - DNA, 200 bp, Protomyxzoa rheumatica
ttccttttcatgccattctattccattccaatccactccactccagtgcattccactccattccatttcattccactccaatgcatttcattccattacattacattccactctactccgttccttccacccattgcaattgattcctctccattccactccactccacttcattccattccactccactccattccacc

SEQ ID NO: 2510 - DNA, 159 bp, Protomyxzoa rheumatica
ttccattctattccattgcataatactccactccacaccactccactccactccattccattccattgctttctactcctctccattccactccagtccattcaattccactccttccaattccattccattccaatccattccaacccactccaatcc

SEQ ID NO: 2511 - DNA, 146 bp, Protomyxzoa rheumatica
cattccattccattccattccattccattccattccaatttctttcgattccattccatttcattccgttccattccattccactccacttcactccactccattacactgcactccattccactccactccactccattccattc

SEQ ID NO: 2512 - DNA, 140 bp, Protomyxzoa rheumatica
ttccatgccactccattgctttctatgccattccgttccatttcacttcactgcactccattccactcgattcctctcaattccattcctttccattccattccttcgaactccactcctgtccgttctttgaatttcat

SEQ ID NO: 2513 - DNA, 184 bp, Protomyxzoa rheumatica
ccactgcattccaatccactgcactccactccacttcactccactccactccactcggtttttttccattccattccattccattctttcagttccatttaattccattccgttccactccactccagtccactccactccactccattacgctccactccattccacttcattgcattccatt

SEQ ID NO: 2514 - DNA, 126 bp, Protomyxzoa rheumatica
ctgaccactccactttagtccacttctctccactacattccattccattccaatgcacttcactcgactccactccattcctctccattccattccaccccattacactccactgcactcaattcc

SEQ ID NO: 2515 - DNA, 161 bp, Protomyxzoa rheumatica
cattccactccattccattcccttccattccagtccattctatcccatcccattccattccatacgtttcgtgtccattccattccattccattcctttagagtctattccattccattctattccaattgagtcaattcctctccattcctttggagtcc

SEQ ID NO: 2516 - DNA, 204 bp, Protomyxzoa rheumatica
gtggaatggagtggagtggagtggaatggagtggagtgcactgagtggaatggattggactggaatggaatggagtggaatggagtggaatggaatgtaatggattggattggaatgaaatggaatggactggaatgcaatggaatggagtggagtggagtgggatggagtggaatggagtgaaatggagtggagtggagtgga

SEQ ID NO: 2517 - DNA, 167 bp, Protomyxzoa rheumatica
tccactcgggttgattcaattccattctattccattccatcgcattccattacaatcgattccattccacacgggttgattcaattctgttctattccattgcattccatttacctccattgcattccattccattccattcgattccattccactagggctgattc

SEQ ID NO: 2518 - DNA, 251 bp, Protomyxzoa rheumatica
cattccatcccatcccattccattccgttccattccattcttgttgattccattcctttccattccattccattatattccattccactccgttccattcaattcctttccgctcagattgattccattccattccattccaatccattccattccattcggattcattccattccattcgtgttcattccattccattccattcagatacattccattcgtgttgattaacttccattccattccattcc

SEQ ID NO: 2519 - DNA, 169 bp, Protomyxzoa rheumatica
gtggagtggaatggagtggagtggaatggaatgaagtggagtggaacagagtggagtggagtcgaatggagtggaatggaatggaatggaggggaatttaatggagtggagaggagtggactggagtggagtggaaggcaggtgaatggaatggaattgagtggaacag

SEQ ID NO: 2520 - DNA, 124 bp, Protomyxzoa rheumatica
attagaattagtagaaatatattagataaagaaatattagtaattaagaatattaattaattgataataattaatatcaatgacattatttataaataacttccaattcgaagattcatttcat

SEQ ID NO: 2521 - DNA, 108 bp, Protomyxzoa rheumatica
ggtggtggttggtagtattactgttggtggtgatggtggtggttggtagtattactgttggtggtggtggtggtggttggtagtattactgttggtggtgatggtggt

SEQ ID NO: 2522 - DNA, 241 bp, Protomyxzoa rheumatica
tccattcgattctattccatttgagtccattacatttgggtccattccattccactccattccattcgattctattccatttgagtccattccattcgggtccattccattccactccattccattcgatgccattccattcgagtccatttcactccagtcgattccattcgatgccattccattcgagtccatttcattcgaatccattccattgcattccattcgatgccattccatt

SEQ ID NO: 2523 - DNA, 157 bp, Protomyxzoa rheumatica
gaatggaatggaaacgaatggaacggaatggaatggattgcaatagaaagtaatagaatggaatggaatcatttggaagggaatggaattgaatggaatcgaatggaatagaattggatgtaatggcatcgaatggaatggaatggactcaaatgga

SEQ ID NO: 2524 - DNA, 164 bp, Protomyxzoa rheumatica
gatcccattccattccataccattccattcaattccactccggttgattccattccaatccattcctttccattccattcccctcaggttatttccatcccattccattcattccattccaatacattccatttcattccattccattccattccattccatac

SEQ ID NO: 2525 - DNA, 193 bp, Protomyxzoa rheumatica
gaatggaatggaatggaatggaatggaatggattggagtcaaggtgagtgcaatggagtggaatggaatggaatggaccctaaccgaaagtatcggaatggagtggaatggaatagaatctaccagaatggaatggaatggaatcgaatggagtggactggaatgaaacggaatagaatggaatggaatcaac

SEQ ID NO: 2526 - DNA, 123 bp, Protomyxzoa rheumatica
gcaatgaattggaatggaatggaatggaatggaattgaatgaacccgagtggaatgaagttaaatggaatggaatggaaaggatttgaatggaattgaatcaacccgagtggagtggaatgga

SEQ ID NO: 2527 - DNA, 146 bp, Protomyxzoa rheumatica
tccattccattcgagtccattccattctattccattcgtgtccattccattccactcaaatcctttccattccattcgagccaaatccattccattatattcgagtccattctattccattccagtccattcgagtccattccatt

SEQ ID NO: 2528 - DNA, 141 bp, Protomyxzoa rheumatica
tccattccattcgagtccattccattgcattctagtccattcctttccattccatttgagtccattccaatccattcctctcctttccattccgttcgattccaatccgttccaatccattttatttcagtccattccatt

SEQ ID NO: 2529 - DNA, 177 bp, Protomyxzoa rheumatica
agtggagtggaatggaatggagtggagtggaatggagtggaatggaacggaacagaacggaatggaatggaatggaatggagtgaaatggagtgttccggagtgcagtggaatggagtggaatggaatggagtggtgtggaatggaatggaatggagtagaatggaatggaatggat

SEQ ID NO: 2530 - DNA, 176 bp, Protomyxzoa rheumatica
cactccactccactcaactctgtttcattctgttccattccattcttttccattgcattgcattccgttccattccattccactctgtaccactccattccactccagtccattccactccactccactatactctattccactccactccactccattccattccattccattcc

SEQ ID NO: 2531 - DNA, 140 bp, Protomyxzoa rheumatica
agtctgggtgacagagtgagatccagttgaaataaaggaatggaaagcaatggagtagaatggaatggaatgcagtggagtggaaagaaatggagtggaatagagtggaatgcagtgtaaaggagtggaacggaatggaa

SEQ ID NO: 2532 - DNA, 124 bp, Protomyxzoa rheumatica
ccattccattccattccattccatttctttcccctccactccactcaactccattccattcctttccattccaatccattccaagcatctccattccatccctctccactgcattccattcaac

SEQ ID NO: 2533 - DNA, 131 bp, Protomyxzoa rheumatica
ccacttcactccaatccactccactcaattgcattccatttcattccattaaattccattccattccattacattcaactccattacaatcggccgccctccactccactccactcgattccattccattc

SEQ ID NO: 2534 - DNA, 167 bp, Protomyxzoa rheumatica
tggaattgaatggactcaaatgcaatggtctcaatggaatagaataaaatggaatggcatcgaatggaatggaatggtattgaatggaatggaatgggattgaatggaatggacccaaatctaatgaactcgaatggaatggactcaaatagaatggactcgaaagg

SEQ ID NO: 2535 - DNA, 155 bp, Protomyxzoa rheumatica
atggaatggagtggagtggaatggaatggaatggaatggactcgatcacaatggacttgaatggaatggactcgaatgtaatggaatggaatgcagtggaaagatatcgaatgggatggaatggaatggaaaggaatggaatggagtggagtgga

SEQ ID NO: 2536 - DNA, 146 bp, Protomyxzoa rheumatica
gaatggaatggaatggcatggaatggaatcaaaaggaatggaatggaatcgaatcgaatcaaatcgaattgaatcgaatcaaattgaatcaaatggaatcgaatggaatcgaatggaaaaaatggaatcaaatggaatcgaatgga

SEQ ID NO: 2537 - DNA, 162 bp, Protomyxzoa rheumatica
ggaatggaatggaatggaatggaatggaatcaaaccgagtgtaatggagtggaatggaatggaatggaatggaatagaatagaattgaatcaaggagagtgaaatgcaatggaatggagggcaatggattggaatggaatggaatggaatggaatggaatgg

SEQ ID NO: 2538 - DNA, 154 bp, Protomyxzoa rheumatica
ttccactccattccactccacttcactccactccattccactccatcccattcaattccactctattccactcccatcaactccactccactccattccattccattcccttccattccattcctttctttcgacaggatctcactgtcacacc

SEQ ID NO: 2539 - DNA, 174 bp, Protomyxzoa rheumatica
aatggaatggaatggaatcaacccgagtggaatgtaatataatggaatggaatggaatagaatcaacccaagaagaattgaatggtaaggaatgaaatggaatggaatggaatggtatggaatgtaatggaatggaaggcaatggaaaggaatgcaatggaatcaaaacgagtg

SEQ ID NO: 2540 - DNA, 233 bp, Protomyxzoa rheumatica
cattctattatatttgattccaatccattcgagtcgattccattccagtctattccattcgattccattctattcaattccattccgtttgattccattccattccattccattctattgcattccattcgagttcattccattccaatccgttccattcgagtccactcaattccggtccattacgtttgggtccattccatttcattccattctattccattccattccat

SEQ ID NO: 2541 - DNA, 134 bp, Protomyxzoa rheumatica
ccactccattccactccattccattccactacattccactcaaatccattccactccattccattccactcctctcctctccatttcattcctctctattccattccattccattccatttcattccattccat

SEQ ID NO: 2542 - DNA, 186 bp, Protomyxzoa rheumatica
tgatgattccatttgattccattcaatgatgattccattcaatttctttcgatgatttcattcaattccattcgatgattccttttgattccattcaatgatgatttcagttgattccattcgctgatgattccattcaattccattctttgagtccatttgattccattcgatgatgattccatt

SEQ ID NO: 2543 - DNA, 226 bp, Protomyxzoa rheumatica
attggattctattccattccattccattccgttcaatacctttccattccattccactcgggttgattctattgaataccactccattcctttacattccattccattcctctcgctttgattacattgcattcctttcctttccattccattccattccgttccataccattccattccattccatttcattccataccattccattccactcgggttcattcta

SEQ ID NO: 2544 - DNA, 159 bp, Protomyxzoa rheumatica
caactcgagtggaatggaatggtatggaatggattggaattaaatgcaatgcaatggaatggtatcattccgagtggaaaggaagggaatgtaatcgagtggaatggaaaggaaaggaatcaacccgagtggaaaggaaggtaatggaatggaatggaa

SEQ ID NO: 2545 - DNA, 175 bp, Protomyxzoa rheumatica
ggtttcgaaaggaaaggactggaattgagtgaaagcgtatggaatggactcgaatgcaatggaatggaatggactgggctataatggaaaggaatggaatgcaatggatttgaatggaatggaatggaatggaaaggaatggacacaaacggaaaagaatgggagggaatgaaat

SEQ ID NO: 2546 - DNA, 161 bp, Protomyxzoa rheumatica
ggaatggaatggaatggaatggaatggaatggaatggactcaaagggaatgtacttgaatggaatggaatagtttggaaaggaatccaatggaatggaatggaatggaacggactcgaattgaatggaatggaatggaatggaatggaatggaatgaaatg

SEQ ID NO: 2547 - DNA, 165 bp, Protomyxzoa rheumatica
taattggaagaaatggaattgaatggagtggagtggagtggaacggattgcaaaggaatgggaaggaatggaattgaatggactggggtggaatggagtgaagtggaatgcaatggaatggagtggagtgcagtggaatgcaatggaatggaatggaatggattc

SEQ ID NO: 2548 - DNA, 231 bp, Protomyxzoa rheumatica
ttgcattccattccattccatttgattacatttcattcaattccattccattggaatcaattacattgcaatacattacattcgattctgttctatttcagtccattccattcctgtccatccatttgattccattccattcgattgcaatccatactcttgcattccattcgattccattttattcgaataaattccattggagaaaattccttttgagtccattctatt

SEQ ID NO: 2549 - DNA, 137 bp, Protomyxzoa rheumatica
tttcattgcattccattccttcccattctattccattccattccattcaattccattcaattccattcaggtccaatccattcaattccattggagtcaattgcattccattccattcgagtcctttccattgcatt

SEQ ID NO: 2550 - DNA, 134 bp, Protomyxzoa rheumatica
ttccattgcattccattccattccattccattccactccaacacattccattccacaccattccactccactccaccacactccactatactccactccattccattctattccattccactgcccttcgttcc

SEQ ID NO: 2551 - DNA, 180 bp, Protomyxzoa rheumatica
ggaatcaactggaatggaatggaatggaatcgaatagaatggaattgtatcacttggaatggaaaggaaagcaatggaatgaaatggaagggaacggaatggaaaggaatcaaaccgagtggaatagaatggcatggaatggaatggaatcaaccagagtggaatggaatggaatggaat

SEQ ID NO: 2552 - DNA, 140 bp, Protomyxzoa rheumatica
gaacggaatggagtggagtggggtgtaatggagtgtagtggagtggaatagagtggagtggattggggtggaatggattggaatagaatggaatggaatggaaaggagtggagtggattgggatggagtggaatggaatg

SEQ ID NO: 2553 - DNA, 173 bp, Protomyxzoa rheumatica
gaatggaatggaatggaatggaatcaactcaattacaatgaaatataatggaatggaatggaattacccgaatagaatgcaatagaatggaatagaacggaatgtaaaggaatggaatggaatggaatcaagccgagtgcaggggaatggaatggaatggaatgcaatggaat

SEQ ID NO: 2554 - DNA, 154 bp, Protomyxzoa rheumatica
cattcgagtccattcgattccattcgatatcattccatttcactctattccattctattcctttcaattacattcaattccattccattcgtttccattccattctattactttccattcgactccattcctttggagtccaatccatttaatt

SEQ ID NO: 2555 - DNA, 380 bp, Protomyxzoa rheumatica
ggaatggaatcaaatgaaatggaatggaatcgaatgcaatggaatggaagggaatggattggaatggaacggaatgggatggaactgaatggaatggaagggaaatgaatggaatggaatctaatggaatggaatcaaatgaaatggaatgcaatcgaatgcaatagaatcgaaaggaatggaaaggaatggaacggaatggaatggaaatgaatggaatggaatggaatcgaatggaatggaactgagtggcatcaaatggaatgcagtgaactggagtggagaggagtggaatggagtggaatggaaaagaatggagtggagtggattggattggaacggagtggaatggaatgggaaggaatggaattgaacagagt

SEQ ID NO: 2556 - DNA, 139 bp, Protomyxzoa rheumatica
ccattctgttctattccactccattccactccactctactccagtacactccactccaatccattccaatccattccactccattagactccattccactccattccattccattcctttccattccatttcattccat

SEQ ID NO: 2557 - DNA, 124 bp, Protomyxzoa rheumatica
ataatggagtgaaatggagtggagtcgaatggaatggaatggagtggagtggaaaggatttgagtggagtggaatggaatggagcagaaagtaatggaatggagtggaatgtaatggaatgtaa

SEQ ID NO: 2558 - DNA, 168 bp, Protomyxzoa rheumatica
tggaatggaatggaatggaatggaatggaatggaaacaactcgaatggaatggaatgtaatggagtgttagagaattgaatagaatcaatctgaatgtaatgaaatggaatggaacggaatggaaaggaatggaatggaatggaatggaaacaaccagaatggattgg

SEQ ID NO: 2559 - DNA, 150 bp, Protomyxzoa rheumatica
aacctagtacaatggaatggaatggaatggaatggaatggaatggacccgagtgcaatggaatggaatcgaatgaagtggaatcgaatggaatggattcaacacgaatttaatggaaaggaatggaattaacccgagtggaatggcatgg

SEQ ID NO: 2560 - DNA, 185 bp, Protomyxzoa rheumatica
tacccttctttcctttccattccactccattccattacactccattccattccattcaactacacttaattccattccattccattctactccattccattacactcctttgaattccactacactccattccattttattccactccattccattccacttcattccattccattgcactccac

SEQ ID NO: 2561 - DNA, 124 bp, Protomyxzoa rheumatica
ccattccattccactcgaatccactccattccatttcaatccattccattccattcaattcccctcacattctatctattccattccatttcattccgttctgttccattccactctactgcat

SEQ ID NO: 2562 - DNA, 320 bp, Protomyxzoa rheumatica
taatataatggaaatgaatggaatccacccgaatggaaaggaaaggaatgaaatggaatggaatgaatggaatggaatggaaaggaatcaatccgagtggaatggaaaggaatggaatggaatggagtggaatggaatggaattgatatgaatggaatgtaatcaactggaatgcaacggaatggaatctaatggaatggaatggaatcaactagaatgaaaaggaatggaatggaatggaatgcagtggaaaggaatggaatggaatcaacctgtgtgaaatgtaatgcaaaggaatggaatggaatggaatggaatca

SEQ ID NO: 2563 - DNA, 162 bp, Protomyxzoa rheumatica
gattcaaatgcaatggactggaatgtaatggacttgaatggaatggattcgaatggaatggaaccgaaaggaatggaatataacggaatggaatcgaatggaagggagtcgaatggaatggaatccaatggaatggaatcgaatcaaatggacacaaatgga

SEQ ID NO: 2564 - DNA, 149 bp, Protomyxzoa rheumatica
ctccattccactccactccattccatttcactccactccattcctctccatttcattccattccactccactccactccagtctattccactccactccattacactccacaccattacattccagtacactacattccattccactcc

SEQ ID NO: 2565 - DNA, 164 bp, Protomyxzoa rheumatica
ggattccattccattccggtccattccaattcattccattccattccattctgttccattcgaggccattccattccattcgagtccattccaatccattccattcgagtccattccattccagtctattccatttgagtccattccattccattcattcgtgt

SEQ ID NO: 2566 - DNA, 113 bp, Protomyxzoa rheumatica
ccgttctattccattgcattccatttacctccattgcattgaattccattccattcgattccattccactagggttgattcaattccattctattcccttccattccattcca

SEQ ID NO: 2567 - DNA, 259 bp, Protomyxzoa rheumatica
tctccattccattctattccactcgaccccactccactccactgccgtccactccattccattccattctataccactccactcaattccaatccactccactgcactccattccattccattccactccacttcactcctctacattccattacatctgattccattccagtccattccacttcacaccacacctccattccattccattccttttcactccactccactccactgcattccattccattccattcca

SEQ ID NO: 2568 - DNA, 130 bp, Protomyxzoa rheumatica
actccgatcccctccacttcactgaattccactctattccattccattatgttccattccgttctttcttttccattccactccattccattcctatccattccactccattccactccatttcactcca

SEQ ID NO: 2569 - DNA, 184 bp, Protomyxzoa rheumatica
ttccattccattccattccattccattccacaccattccattacattccagtccattacattccattccattacacaaggaatgattctattccattccattccatcccattcctttccattccaggtgattccaatgccttccattccattctattccattgcattgcattgcattccattcc

SEQ ID NO: 2570 - DNA, 252 bp, Protomyxzoa rheumatica
aatggaatggaatgtaatggaatgaaatgtactcgaatggaatggaatggaatgcaatggactcgagtggaatggtatggagtggcatggaatggcatggaatagaatggaaatgactcaaatggaatgcagttgaattgaatggacctgaaaggaatggaatggaatggaatggaaaagaaaggaatgaaatgcactcgaatggaatggaacggtacagaatggactcaaatgaaatggaatggacccaaa

SEQ ID NO: 2571 - DNA, 163 bp, Protomyxzoa rheumatica
atggaatggaatggaaaggaatggaatggaatcaacccgaatggaaaggaatagaatggaatggagtggagtgaaatggagccaaaccgagtttaatggaatggaatggaatggagtgcaattgagtggaatggaatggaatggaatggaatcaaccagagtg

SEQ ID NO: 2572 - DNA, 136 bp, Protomyxzoa rheumatica
ggaatgcaatgcagtggaatgggttggagtgtaatggaaaggagtggaatggaatggaatggaatggagcacaatgcagtggagttcagtggtgtggaatatagtggagtggagttgagtggaaaggaatggaatg

SEQ ID NO: 2573 - DNA, 149 bp, Protomyxzoa rheumatica
tggaatggaatggaatggaatggaatcaactggaatggaacggaaaggaatgaaacggtatggaaagaaaggaattgaatggaatggaagggaatggaaaggaatttgttggaatggaatggaatggaatggaaaggaatggaatcaac

SEQ ID NO: 2574 - DNA, 138 bp, Protomyxzoa rheumatica
tttccctttcatgccactccactccactccgattcatttcactcctttccactccatgccactccattcctctccactccactccgctacactacactccactacattccactccatttcactctattccattgcatt

SEQ ID NO: 2575 - DNA, 133 bp, Protomyxzoa rheumatica
ctccactccactccattccattccactcctctccattccattccactccattctattccacttcactctgctccattccattccattacactacactccattccattccatttttttgaaatccactccattc

SEQ ID NO: 2576 - DNA, 171 bp, Protomyxzoa rheumatica
actccattccactccattccattctattgcactccatgccattcctttcctctccactccactctattccactgcactccattccattcatctccattccattccataactttccactccagtacattcatttctattccattccattccattccattccactcatgttga

SEQ ID NO: 2577 - DNA, 214 bp, Protomyxzoa rheumatica
attccactcgattacattcccttccattccactcgcaatgattccattcccttccattgcattccattccaatccattccacaccattccattccactcgagttgattccattccattccatttcattgcattccattgcattccaatccatgccattccattccattccatagcattccattccattccattccattgcactcgagttgattc

SEQ ID NO: 2578 - DNA, 166 bp, Protomyxzoa rheumatica
attacactccactccataacaatccattccattccactccattccgttccattacactccactccattcaactccacaacattccattacattcttgtccattccattccactctaacccattccattccactccactcaattgcactccattccactccattcca

SEQ ID NO: 2579 - DNA, 217 bp, Protomyxzoa rheumatica
atggagtggaatggaatagaatggaatggagaggaatggaatagaatgaaatgaaatggattcaaatggaatggaatggtattgaatggaatggaatggaatggattggaatggaatataatggaattgaatggacttgaatggaatgaatggaattgaaaggaatggaatgaaatgaaaccgaacggaatggaatggaatggactcgaatggaatg

SEQ ID NO: 2580 - DNA, 143 bp, Protomyxzoa rheumatica
tgcaaaggaacggaatagagtggaatggaattgaatggaaaggaaccgaatggaatggaatggaacagagtggaaagaatggcatgaaatggaatggaatcaatgcgagtgtaatgtaatggaatggaatggaatggagggga

SEQ ID NO: 2581 - DNA, 290 bp, Protomyxzoa rheumatica
ctttcaattgcattccattcgactccattccagtggaatccattccattcgagtccattccattcgggtacattccattccagtccattacatttgattccattccattccatactattccattgcattccattcaagtcaatacccttcgagtccatgccattccagtccattacattcgagtccattccattccattccatttcatttcgctccattccattcgagtcctttccattcaagtccattacatttgagtccattcccttccattccattccattccattc

SEQ ID NO: 2582 - DNA, 133 bp, Protomyxzoa rheumatica
gagtggagtggaatggagtggagtggagaggaatggaatgctgtggagtggagtgcagtggaatggggtggattggaatttaatggagtggaatggagtgaaatggagtggagtggaatggaatggaatggag

SEQ ID NO: 2583 - DNA, 100 bp, Protomyxzoa rheumatica
tgaaatggaatggaaaggaatggaaggaaatggagtggaacggaatggagtggaatggattgcagtgcagaggaatggaatgggatggagtggaatgaaa

SEQ ID NO: 2584 - DNA, 191 bp, Protomyxzoa rheumatica
atgcagtggaatggaatggaatggaaaggaatggaatggactggaatcgaatgaaatggaatggaatggaatggaacagaagggaatgaaatcgaaaggaaaggattcgaaaggaatggattcgaatggaatggaatcgaatttaatgaaattgaacggaatggactggaatggaatggaatcgaatggaa

SEQ ID NO: 2585 - DNA, 124 bp, Protomyxzoa rheumatica
tggagtggtatgaaatggagtgaagttcagtggagtggagtggagtgaagtggagtggagtgaagtggagtggagtggagtcgaatggagtttagtggaatggaatggagtggaatggaatgga

SEQ ID NO: 2586 - DNA, 155 bp, Protomyxzoa rheumatica
atcccagtccactccactaaattcctttccattccattgcactccactccactgcactccaccacactccactacacttcattccattcctctccactccattccattctactccactccattcaactccactatactccgtttccctcctctcc

SEQ ID NO: 2587 - DNA, 131 bp, Protomyxzoa rheumatica
gattcctttccatggcattgcattccattccattctaatttattccattccattccataccattccattccactccactctttttaattccattccatcccatctcattccattgcattccattccatttc

SEQ ID NO: 2588 - DNA, 239 bp, Protomyxzoa rheumatica
ttgagttcattccattccactccattccattccatttgatgccatactattctatactattccatttgactccattccattccattccatttgatgccatatcattctattctattccatttggctccattccattccattcctttccatccgattccattcctttctattccttttcattccgttcccttccattgcgttgcattccattccattccattggtttccattccatttgc

SEQ ID NO: 2589 - DNA, 140 bp, Protomyxzoa rheumatica
agtggagtggaatggaatggagtggaatggaatggaatggtatggactggaatgaaatggaatggagtggaatacaatcgagtggagtggagtggattggagtggaatggagtggagtggaatggagtcgaatggagtga

SEQ ID NO: 2590 - DNA, 135 bp, Protomyxzoa rheumatica
ttcgattccattccattgcattgcattccatcccattggattgcattctattccattccattccattccaatcaattacatggcaatccattacgttcgagtctattctattcctttccattcgatttcgttcca

SEQ ID NO: 2591 - DNA, 268 bp, Protomyxzoa rheumatica
ttatattccattccattcgattcggatccattcgattctaatctgttcaattccattttgttcggttccattccattcgattccattccattcgattccattcctttccattccattgaattctattccatcccactcgattccactccgtttcattctgttgtattctattctattccattcgattgtattcttttccttccatttgattccattccattcgactccactacatacgactccattacattcgattccattgctttcc

SEQ ID NO: 2592 - DNA, 225 bp, Protomyxzoa rheumatica
gacttgaatggaatagagtcgaatggaatggagtcgaatggaatgtaatcgaatttaatggaatcaaatggaatggaattgaattgatttgtaaggaacagaatggaatggggtgttattgaaagatatcgaatggaatggaatggagtggaatggacttgaatggaatggactggaatggaacggaatcgattggaatggactggaatggagtggactcgaatg

SEQ ID NO: 2593 - DNA, 172 bp, Protomyxzoa rheumatica
gtagtttccattccattccattgcattccactcgattccattgcacacgagttgattgattccattccatttcattcctttgcattccattccacttgggttgattccattctattcctttccattcccttccattcccttgcattccactcgggttgattccattcctttc

SEQ ID NO: 2594 - DNA, 160 bp, Protomyxzoa rheumatica
ttccattccattccataccattccattccattcaattccactcgtattcagtctattccattccattccattccgttatgttccattgcattctataccattccattccacttgggatgatctattccattccattccattccattcccttccattccat

SEQ ID NO: 2595 - DNA, 157 bp, Protomyxzoa rheumatica
ggactcgaagggaatggagtcgcatggaatggtatcgaatggaatgggatcgaatggaatggaattgaatataattgaaatgaatagaatggaatggagtgtaatggaatgatatcgaatggaatggaattgaatggaatggagatcggaagagcgg

SEQ ID NO: 2596 - DNA, 192 bp, Protomyxzoa rheumatica
tccattcgaatccattccattcttttcatgtccattcctttccattcgtttccattggagtccattccattccattccatgcctttcgagtacattccattccattccagtcaatgccattccattcgcttcaattccattctattccattccattccatttgagtcctttccattcctttcgagtccgttt

SEQ ID NO: 2597 - DNA, 200 bp, Protomyxzoa rheumatica
cctcattttcattccattccattccattccactccattccattacattccattaaattacattccactccattccattccactctattccattccattcccttacattccactcaacaccattccattccactccattccattccattccaatctattgcactccactccattccattctattccattccatttcattcc

SEQ ID NO: 2598 - DNA, 191 bp, Protomyxzoa rheumatica
aatggaatggaaaggaatggaatggaatggaatggaatggatttgattggaatggaatccacacgagtggaatggaatgcaatggaaaggaatgaaatggaacgcaatcgaaatgaatgaaatggaatggaatggaatggaatggagtggaatgggatgaaatcaacctgagtggaatggaatcgaatgga

SEQ ID NO: 2599 - DNA, 278 bp, Protomyxzoa rheumatica
cctccaatccactccactcaactgcactccactccgctccactccattccattccattccattccatttcattccactcctttccattccattgcactaaattccattacattccacaccactccattgcattccattccacaccattccatttcattccactccattccattgcattccactagattcaattacattccactccactcaactccactccactccactcagttccattccgttacgttccattctgttcctttccattccattccatt

SEQ ID NO: 2600 - DNA, 161 bp, Protomyxzoa rheumatica
aataaacaccaggggaatgaaatggattggaatgaaatagaatggaatggaatggaatagaatgaaatcaaacagattggaatggaacggcatggaatggaatggaagggaatgaatggaatggaatggtgtggaatcaacacgagaggaatggaatggaa

SEQ ID NO: 2601 - DNA, 185 bp, Protomyxzoa rheumatica
gactggaggaaagaaatcgaatgaaatcgaatggaatgaatggaagagagtgcaatgttatagaatggaatggagacagatggaatggaatggaacagagagcaatggtatagaatgcaatggaatcatatgaaatggaattgagtggaatggaataatatgaaatggaatggaatggaatggaa

SEQ ID NO: 2602 - DNA, 189 bp, Protomyxzoa rheumatica
cgattccattgcattccattcgaattcaatccattccattcaattccattgcattcgattccgttgcattccattccatttcattccattcatgtccattccattccattccgttccattccattcccttccattttatttgaatccattccatttgattccattccattccatttcaatctaatccgc

SEQ ID NO: 2603 - DNA, 173 bp, Protomyxzoa rheumatica
gaatggattggaatggaatggaatggaatggaatggaagggaatgaatggtttcggatcaaaataacccgagtggaatattacgtaatgtagtggaatggaatggaatggaagggaatggattggaaacaacccgagaggaagagaatggaatggaatggaatggaatggaat

SEQ ID NO: 2604 - DNA, 240 bp, Protomyxzoa rheumatica
atggaattgaatggaatcaaaaggaatagaatggaatggagtgtaatggaaaaatatcaaatggaatggactcgaatggactgggcttgaatggaatggtctcgaatggaatggactggagtggaatggactcaaatggaacggaaaagaatggaatggaaaggaatggaatggataggaatagaatgcaatggaatcggatggaacggaatggaatggaatggagtcgaatggaataga

SEQ ID NO: 2605 - DNA, 125 bp, Protomyxzoa rheumatica
cgtttcactcctttcccttccattcctctctattccattccactccactccaatccaatccactccactcctttccataccactccattccattctagtccactccaatcactccattccattgc

SEQ ID NO: 2606 - DNA, 188 bp, Protomyxzoa rheumatica
ccgttccattccattccactccattccactccattccattttattcctcttcactccactccattccattccactcgattccactcaactccactccaattcactccactccacttcactcctttccacttcactcctctccattccactccagtgcactccattccattcttctccactccactaaa

SEQ ID NO: 2607 - DNA, 163 bp, Protomyxzoa rheumatica
cactccactccaatccattgctctccactccattccattccactgcacgctactcagttccactccactccattccctttcaccccattccattccactccactccattccattccactaaattccactccactctactctaatccactccactccattccat

SEQ ID NO: 2608 - DNA, 222 bp, Protomyxzoa rheumatica
aatggaatggaatggcatggaatcgaatggcatggaatttaaaggaatagaatggaatggaatggagtagaatggaattgatttaacccgagtggaatggaaaggaatggtatggaatgcaatgcaatggaatggaagagaattgaattgaatcaacctgagtggaatggaagtgtgtggaatggaatggaatggaatggaatgacatggaatggaatggaa

SEQ ID NO: 2609 - DNA, 416 bp, Protomyxzoa rheumatica
acagtggcacaatctgagctcacatttcatttcacctttccattccattacactccattccactccagtccactcaactccactccactccattccattccattccactccactccaatcctctcctctcctctccattccatcttattccattccattccattcgactccactccactcttctccactcctctccaatccattccactccactccactccactccattccagtctactccactccactccattccatcccacgccattccactcctttccactccactccactccattccattccactctactccactccactccactcctctccattccactccaatccattccactcctttccactccatgccactccattccactccactccactccattccattccactcc

SEQ ID NO: 2610 - DNA, 220 bp, Protomyxzoa rheumatica
attccattccattccgttccattccattccattacattcggatggattctattcaactcccttactctccattacattccattccattagggctgttccattccattccattgcattccactccattccattgcactcgggtttattccattccattccattccattccatttcattccgttccattccggaagattccattccattgcattccattcca

SEQ ID NO: 2611 - DNA, 180 bp, Protomyxzoa rheumatica
aatgtaatagaaaggaatggactcaaatagaatggaatggaatcgaatggaatgtactctaatgcaatggagtggaatggactcgaatggaatcaaaatgaattaaatggactggaatcgaatggaatggaacagacgcgaatggaatggaaaggaatgtaatggacacgaatggaatgg

SEQ ID NO: 2612 - DNA, 125 bp, Protomyxzoa rheumatica
gtggagtggaataaaatggaatggaatggaaaggaatcaaactgagtggaacggaatgatatggaatggaacagaatggaatgcaatggaatcaattggaaaggaatggaatggaatggaatgga

SEQ ID NO: 2613 - DNA, 100 bp, Protomyxzoa rheumatica
tagaatggaatggaaaggaatggaatggaatgatgtcgaattgaatggaatttaatggaatagaatggaatggaaaggaatggaatggaatgatgtcgaa

SEQ ID NO: 2614 - DNA, 152 bp, Protomyxzoa rheumatica
ggaattgaatggaatggaaaggaatggaatggaattcaatccagtgtaaaggaatggaatggaatggaatgaaatggaatggaataaattcgaatggaatggaatggaatgaaaagtaatataatggaaatgaatggaatccacccgaatgg

SEQ ID NO: 2615 - DNA, 174 bp, Protomyxzoa rheumatica
gaaaggagtgaggtggaatggagtggattggagtggagtggagtggaaaggagaggagtggaatggagtggggtggaatggagtggactgtaatggaatgaagtggattgcagtggaatggagggaaagaaatagagtagagtggaatggaatggaatggaatggaatggaatg

SEQ ID NO: 2616 - DNA, 173 bp, Protomyxzoa rheumatica
ccattcggtttgaagtcattccattccattcaattcctttccattctattccattccattccacgtgggttcattccattgcattccattccattctattccattcctttcacttccatcccattccaatcgagttgattccattgcattcgattccattccattccattcca

SEQ ID NO: 2617 - DNA, 184 bp, Protomyxzoa rheumatica
acgcaattgcaaaggaatggaatggaattgaatggagtaaaccggagtggaaatcaatggaatggaagggattgggatagaatggaatggaatggactggaatggaatcaatccgactggtattgaaaggaatatgttggaatagaatggaatggattggaatggaatgcaatggaatggaatg

SEQ ID NO: 2618 - DNA, 127 bp, Protomyxzoa rheumatica
cattcctttcgagtccattccattccactccgtttgatgccactccttttaactcctctccattcgtctccattccattccatttagttccatccgattccattccattctattcctttccattcca

SEQ ID NO: 2619 - DNA, 152 bp, Protomyxzoa rheumatica
tcttagctgacatttcatttcaccattccattccattccattacactccactccattccattctacttcaatccatcccattccattccaccccattccattcaattccattctttccactccactctacttctctccattccactccactc

SEQ ID NO: 2620 - DNA, 146 bp, Protomyxzoa rheumatica
ttccattccatcccattccatttcactccattcctctccactcaaatccactccactccattccattccactccatcccattcctttccacttcattacgctccattccactccactcaactccattccattccattccattccat

SEQ ID NO: 2621 - DNA, 157 bp, Protomyxzoa rheumatica
ccatttgggttgaatccatttcattccatttcgttccattacattatattccgtacgattccattccattcatttccttaccattccatgccattgcaatcgggtggattccatttaattcctttctattctggttcattccattccgttccattcc

SEQ ID NO: 2622 - DNA, 170 bp, Protomyxzoa rheumatica
cggaatggaatcaaccagagtggaatggaatggaatggaatagaatggaatggaatgaaatgaaactgaaacaatccgcgtggaatggaatagaacggaatgcaaacaaactgagtggaatggaatggaatggaatggaatgcagtggaatggaatggaatggaatggaa

SEQ ID NO: 2623 - DNA, 145 bp, Protomyxzoa rheumatica
tcgatgccattccattcgattctattccattcgactccattccctttctttccattccatgaaattccattccattctattcctttccattccattccaatgtattacattccattccgttcgtgtccattccactccagtccat

SEQ ID NO: 2624 - DNA, 184 bp, Protomyxzoa rheumatica
aaatgaatggaatggaatggaacggaatggagtggtgtggagtggagtggaattgagtgtagtggatcagagtgcagtgaaatggaatggaatggagtgcagtggagtggaatggagtggaatgcaatggagtggagtggaaaggaatggaatggaaacagaatggaattgaatggaatgaaaa

SEQ ID NO: 2625 - DNA, 144 bp, Protomyxzoa rheumatica
gggcatggaaaggaatggaatggaaggaacggaatggagtggtgtggagttgagaggaatggatcagagtgcagtggaatgggatggaatggaattgagtgcaatggaatggaatggagtggaatgaaatgcaatggaaggcag

SEQ ID NO: 2626 - DNA, 137 bp, Protomyxzoa rheumatica
gatgtactttcatattttatgtacagtgtataatacatgccttgggtactttcatattttttgtacagtatagaatatctactttgggaactttgatattttatctacactatataatatatagtttgtgtactttg

SEQ ID NO: 2627 - DNA, 152 bp, Protomyxzoa rheumatica
tggaatggaatggaatggaatggaatggaatgaaatcaacatgagtggaatagaacggaatggaatgaaatggaaaggaatgaatagaatggaatggtgtggaatcaacacgagagcaatggtatggaatggaatggaatggaatggaatgg

SEQ ID NO: 2628 - DNA, 120 bp, Protomyxzoa rheumatica
tggaatggaatggaatgggaaggaatgtaattgaatggcgtggagtggagtggacaggagtggaatggtatgcagtggaatggaatggaatggaatgggaaggaatgtaattgaatggcg

SEQ ID NO: 2629 - DNA, 156 bp, Protomyxzoa rheumatica
tcaatgattccattcgattttattcaaagatgattccatttgattccattcgatatttccattcgattccattagatgattccaatggattccatttgatgatgattctattcgcgtccatttgatgattccattcaattccattcgatgatgatt

SEQ ID NO: 2630 - DNA, 380 bp, Protomyxzoa rheumatica
agagagagagagagagagagagacagagagagagagacagagacagacagaaagaaagagagaggcagacagacagaaaaagacagagacggacacagagagacagagaaacagagagaaagagagaaagacagagagagccagagagggagagagagagggagagagagagagaaacagaaaggcagggagggagacagagagagacagacagacagacaggcaggcaggcagagaaagagagtaagacagaagataggcacagagagagagagagagagagagacagacagagagacacagaaaaagaaagagaggggcagacagacagagaaagagacagatagagaaagagagaggcagacagagagagacagaaa

SEQ ID NO: 2631 - DNA, 158 bp, Protomyxzoa rheumatica
tggaatggagtggaatggaatggagtggaatggaatggaatgcaatgaaatggaaaggaatgctatggaatcaacctgagtgtaatggaaatgaatggaatggaatggattggaatggaatggaatcaagtcaagtgcaatggaaaggaatagaatgc

SEQ ID NO: 2632 - DNA, 169 bp, Protomyxzoa rheumatica
cattccattccattccattccattccattccatgtcattccattacactccattcaattctgctccactccattccactccactcctttccactccactctattcctctccaatccactccaatccattccactccattccattacattccattccactccactgcatt

SEQ ID NO: 2633 - DNA, 200 bp, Protomyxzoa rheumatica
ttccattccacttcactccactccactataatcccctcctctccattccattccattcctttccattactttccgttacattaaattccattgcattccattccattccactccactcctttctattccaccccactgcattccattccattaaattccattctattgcattcctttccatttcaatcccttccattcca

SEQ ID NO: 2634 - DNA, 206 bp, Protomyxzoa rheumatica
ttccattccattcaattccattctattccattccattccagtgcacttttatccactccactcaactccaatccacacctctccactcctctccattccattcctttccattccattccgttctgttccatgccatttctttccattccattccattccactccactccattcccttccactccactctattccattccactccat

SEQ ID NO: 2635 - DNA, 236 bp, Protomyxzoa rheumatica
atggaatggaatggaatagaatggaatgaaatggaatggaatcaaatgtaatggaccggaattgagtggacccgaatggaatggattggaatggaatgaactcaaatggaatgcaatagaatggaatggaatcgaatgtaatggaatcaaatggaatggaattgaatagaatggaatcgaatggaatagacgaatagaatcgactcgaatggattggaatcaaatataatagaatg

SEQ ID NO: 2636 - DNA, 177 bp, Protomyxzoa rheumatica
catcccattccattccgctccattccattcgtgttgattccattcctttccattcgattccatcccatcccagtccattccgctccattccattcgtgttgattccattccattccaatccattccattccactcctttccgttccattcctttatgctcgggttgattccattcca

SEQ ID NO: 2637 - DNA, 194 bp, Protomyxzoa rheumatica
gacaagatctccctctctcacacagggtgtagtgcagtgggacaatctcagcacacatttcttttcaccattccgttccactccatttcattcctttccattccgtttcattccattccattcatttccattgcattccatcccactccattccattccattccactccattcaattccattccactccattcc

SEQ ID NO: 2638 - DNA, 245 bp, Protomyxzoa rheumatica
tccattccattccgttcctttccattccattccattccaatccattccactcgggttcgttccattccgttccattccattccattcccttctattccattcatttccattacaatccattccactcgggttctttccattccgttccgttccattccattccattctattccattcatttccattccatttcatttgactccaatcgggttgattccattccattccattccattccattccat

SEQ ID NO: 2639 - DNA, 360 bp, Protomyxzoa rheumatica
ggaatggaatggaatggattcaaaccaaatggaatggaatggaatggattggaatggaatggaattgaatggaataaactgaagtggaatggtatagaatggaatggaatggattggaatggaatggaatgggaaggaatggaatcaactagaatggaaaggaatggaatggaatggaatgtagttgaatggaatggaatggaatcaacccgtgtggaatgtaatgcaaaggaatggaatggaatggaatcaaccaaagtggaatggaagggaatggaatagaatggaagggaatggaaaggaatgcaatggagtcaacccaaatggaatcgaatggaatggaatgcaatggaatggaat

SEQ ID NO: 2640 - DNA, 166 bp, Protomyxzoa rheumatica
gaatgcagtggaatggaatggaatggaacggaatggaatgcaatagaatggaatggaaaggagtgcgatggaatggaatagaatggaaataaatcaaccctagtggaatggaatttaatggaatgaaatagaactgaatcaaatcgagtggaatggaatggaatga

SEQ ID NO: 2641 - DNA, 122 bp, Protomyxzoa rheumatica
attccattccattccgttccattccattccattccatttctttcaatttcattccatttgattgcattcgattcgaattcattccattggtgtccattccattctattccatgccatttcat

SEQ ID NO: 2642 - DNA, 152 bp, Protomyxzoa rheumatica
ggaattggatggaactgaatggaatggaatggaatcgaatggaatgcactgaattggaatggactcgaatggaatggacttgagtggaatggattcgaatggaatggaaacaaatggcatggaatggaatggaacggaatagaatggaatgg

SEQ ID NO: 2643 - DNA, 177 bp, Protomyxzoa rheumatica
tggaatggagcggaaagcagtggagtggagtggaatggagtggagtgaagttgaatgaaagaatggaatggaatggagtggagtggaatggaatggaacggaatggtgtggagtgtaatggaatagaatggaatgcagtggaattgaaaggaatggaatggaatggaatggaatgga

SEQ ID NO: 2644 - DNA, 179 bp, Protomyxzoa rheumatica
tggagtgcaatggaatggagtggaatggaaaggaatggaacggaactgaacagagtggaacggagtggattggagtggattggagtggagtggagtggttcagagtgcagtggaaaggaatggaatgaaaaggagtggagtgctgtggagtggagtggattggagtggagtggaaagga

SEQ ID NO: 2645 - DNA, 196 bp, Protomyxzoa rheumatica
gaatggagtggagtggagtggaatggaatggagaggaattgaacggaatagagtggaatggagtggaaaagagtggaatggaatgtagtggaatgaaatggagtggagtgcactggagtagagtagaatggattgcagtggaatggaatgtagtgtaatagaatggaatggaatggaacggaatggaatggaatgg

SEQ ID NO: 2646 - DNA, 157 bp, Protomyxzoa rheumatica
ctttccattccattccattccattccactcgggttgtttccgttgcattccattccattcctttccattccattccttttcactagttttgattccattcccttccattccattccattacacaacattccattcctttcgattccattcaattgca

SEQ ID NO: 2647 - DNA, 156 bp, Protomyxzoa rheumatica
gaatggaatggaatggagtggagtggaattgagtggagaggagaggagtggaatggagtggagtgtagacgagtggaatggaatggaatggaatggggtggagtggaatgtaatggagtggagaggagtgtagtggagtggaatggagtggaattg

SEQ ID NO: 2648 - DNA, 205 bp, Protomyxzoa rheumatica
cattccattccattccattccattccattccattccataatttgagtccattcaattccattccattacactcgaggcttttccattccattcaagtccattcaattcgattctattcctttctatttcattcaattccattccattcgactgcattccatttggttccattcaattagagtccattccattcgtgtccattcca

SEQ ID NO: 2649 - DNA, 229 bp, Protomyxzoa rheumatica
gcggaatggattgggatggagtggaatggagtggagtggagtgcagatgaatggagaggagtggaatgtagtggaatggaatcggatgtaatggaatgtagaggagtggagtggagtcgaacggagtggaatggaagggaaaggaatggaatggaaaggatgtaatggaaaggaatggaatgcaattgaatgcaatggaatagaatgcaatgcaatggaaagttgacat

SEQ ID NO: 2650 - DNA, 150 bp, Protomyxzoa rheumatica
aaatcgattggtaagcaatagtatggaaacgaatcgaatggaatataatcgaatggaatggactggagtggagaggactggaaaggaatggactcgaatggaatgcattgcaatggaatggactcaaatggaatggaatcgaatagaaca

SEQ ID NO: 2651 - DNA, 193 bp, Protomyxzoa rheumatica
tccattccactacattctacttcattcccctccactccactccattccaatgcactccactccactccattccattccattgcattgcattccactgtactccaatccactccactctactccactacactccactccactccactccattccattctgttccattacgttctgtaccgttccattccattcc

SEQ ID NO: 2652 - DNA, 146 bp, Protomyxzoa rheumatica
ctcatcatcaccatcctcaccatcatcattatcatcatcatcaccatcttcattacctcccccatcatcatcatcaccatcctcaccatcatcatcttcattacctctcccatcatcatcatcaccatcaccatactcaccatcgt

SEQ ID NO: 2653 - DNA, 256 bp, Protomyxzoa rheumatica
attccattccattccattccattccattccattccattacattccagttgattcaattccattctattatatgtcattccattctattccattactttccattccattccaatccattccattccagattattcaattccatactattccattcctgtacattccattccagtccattccattccatttcattccattgcattcgagtttcttccgttaaattccattccattccattgaattccattccgttcca

SEQ ID NO: 2654 - DNA, 162 bp, Protomyxzoa rheumatica
aatggactcgaatggaatcatcatcgaatggaatcaaatgaaatcatcatcgaatggaatcatcaacgaatggaatagaatggaatcatcgaatggaatggaatggagtcttcatccaatggaaccgaatggaatcatcatcaaatgaaacctaatggaatc

SEQ ID NO: 2655 - DNA, 150 bp, Protomyxzoa rheumatica
atggagtggagtggagtggaatggagtggagaggaatggagtggaatggaattgagtggagtgaaatggaatggagcggagtggactgaaattgaatggatcgttgagtggagtggagtggaatggggtggagtggagtggaatggagtg

SEQ ID NO: 2656 - DNA, 196 bp, Protomyxzoa rheumatica
atggagtggagtggattggagtggaatggaatggaatggacccgagtggaatggagtcgaatgtaatggactcgaatggaatagaatcgaaagcaatggccttgaattgtatgaaatggaatggaacggaacagaatcaaatacaatggaatgtaatgaaatggaatggactacaatggaatggaatggaatggaa

SEQ ID NO: 2657 - DNA, 231 bp, Protomyxzoa rheumatica
cgaattgaatgaaactgaatggaatggactcgaaaggaatggaatcaaatggcatcgaatagaatcgaatggaatgcggtgaagtggagtggattggagtacagtggaatggagtggattggaacggggtggaatgcaaatgaatggaatggagtggactggagtggagagtaatggagtggaatggaaagggaaggaatggaattgaatgcagaggagtggtggaaagta

SEQ ID NO: 2658 - DNA, 181 bp, Protomyxzoa rheumatica
ccattccactccacccggatttattccattccattccattacattacattccattcaggttgattccattggattccattccaatccatcccatttcattccattccattccattccactcaggttgattccacttcataccattgcattacattccatttcactccactcgggttgattc

SEQ ID NO: 2659 - DNA, 192 bp, Protomyxzoa rheumatica
gtccattccattccatcccattccattccatatgtttcatgtccattccattccattccattagcgtccattccattccattctattccaatcgagtcaattccattctatttcatttgagtccattccattgctttccattcaattccattcgatgccattccattccattccattccattccattccatt

SEQ ID NO: 2660 - DNA, 155 bp, Protomyxzoa rheumatica
aatccactccattccattccactcgggttgattccatttcaatccactccaatccattccattccatcaaattccattccctcccaatccattccattccattccagctgattcaattccattccattccattcgggttgattccattccattcc

SEQ ID NO: 2661 - DNA, 147 bp, Protomyxzoa rheumatica
actccactccactccattccattccactcctctctattccgctctattcaattccattccattccactccactccattccattcgattgcattccatccaacttccctacttcccgttccattccattcctttcaattccattccat

SEQ ID NO: 2662 - DNA, 124 bp, Protomyxzoa rheumatica
tctattcaattcctttacactccattccattccattccattacacacaattccattccattccatactataccattccaattgtgttgaatccattccattacatttcgttccattccattcta

SEQ ID NO: 2663 - DNA, 161 bp, Protomyxzoa rheumatica
tggaatggaatggaatggaatggaatggaatcaacccgagagcaatggtatggaatggaatggagtggaatggaatcaacccgattggaatggcatgcaatggaatggaatcaaaaggaatggaatggtacggaatagaatggaatggaacgaaatggaat

SEQ ID NO: 2664 - DNA, 81 bp, Protomyxzoa rheumatica
atttgaagacatttcctttctcaccttaggcctgaaaacgatcgaaatatccacttccagatacgacagaaacagtgattc

SEQ ID NO: 2665 - DNA, 124 bp, Protomyxzoa rheumatica
gtttggaatggaacagagtgtattggaattgaagggaatggaaggaatggaatggaatggaatggaatcgaattgaatggagtgtacaggaatggaatggattggagaggaatggaatggaatg

SEQ ID NO: 2666 - DNA, 154 bp, Protomyxzoa rheumatica
ctgtccaatcaattccattccattccgtttgagtccattccattccattccttttccttccataccattccgttccattccattccatcccagtccattccgttccattccattctgttcgagtcgattccatttgattccgtgacatacattc

SEQ ID NO: 2667 - DNA, 144 bp, Protomyxzoa rheumatica
actccattctttccacaccattcccctccactccactccacaccattccattccacagcactccactccactacattcctctccattctattacattccattgaaatccactccattccattccatgccattccattctgttcc

SEQ ID NO: 2668 - DNA, 148 bp, Protomyxzoa rheumatica
attccactccaatccattccattcctctgccatcccctccattccactccatttcattccattctattcgattcaatttaattccattgcattccattccactacactgcactccattcctttccttcccattccattccattccatt

SEQ ID NO: 2669 - DNA, 146 bp, Protomyxzoa rheumatica
atggaatggaatggaatggagtgtaaaggaattgaatagaatcaaccagaatggaatggaatggaatggaatggaaaggaatgtaatggaatggaatggaatgatttggaatcaacccgagtgcaatggaatggaatggaatggaa

SEQ ID NO: 2670 - DNA, 157 bp, Protomyxzoa rheumatica
gaatggaatggaatggacacgaatggaattgaaaggaatggaatggacttcaatggaatggaatggacctgaaaggaatagaatggaatggaatggaatggaatgaaatggactgtacttgaatgaaatagagcggagtggaatggactcgaatgga

SEQ ID NO: 2671 - DNA, 163 bp, Protomyxzoa rheumatica
atctaatagactcgaatggaataattattgaatggaatcgaattgaatcattgaatggacccgaatggaatcatcaacgaatggaatcaaatggaatcattgaatggaatctaatggaatcgtcattgaaaggaatcgaatggaatcatcatcgaatggaatc

SEQ ID NO: 2672 - DNA, 154 bp, Protomyxzoa rheumatica
tggaatggaatggattcaactcgaatggaatggaagggaatggaatcaacgcgagtggaatggcatggaatggaatggaatggaaaggaatggaatggagtggaatggaatctaccccaatacaatggaatggaatggaatcaacccgagtgga

SEQ ID NO: 2673 - DNA, 151 bp, Protomyxzoa rheumatica
ggaatggaatggaatggaatcaacccgagtggaatggaataaaatagaatggaatgcaaaggaatcaaactgagtggaacggaatggattttaatggaatggaatggaacagaatggaatgcaatggtatcaaaaggaatggaatggaatg

SEQ ID NO: 2674 - DNA, 292 bp, Protomyxzoa rheumatica
cactccattccactccactccactccattccactccactccactccatttcactccactccattccattctactcaactccattccactcccctccactccattccattcaattccattccattgcactccattccataccactccactccattcaattccagtccatttcattacactccattacactccattccattccactccactccactccaatccactcctttccattccattccatgcctttccgttccacttcattccattccattccattcctttccacacca

SEQ ID NO: 2675 - DNA, 297 bp, Protomyxzoa rheumatica
tggaatggaatggaatggaatggaatggaatggaatgaagaagagtggagtggaatgaaatggaacagaatgggattaaatggagtggagtggaattgaatggagcggaggggaatggaatggaaaggagtgaagtggaatggaatagagtggagtgaaatggaatagagtggagtttagtggtatggagaggagttgagtggaatggagtggagtggagtggattggaatggagtggactggaatgcagtggaggggaatggcttggaatgaagtggaatggagtggaatggaatg

SEQ ID NO: 2676 - DNA, 158 bp, Protomyxzoa rheumatica
ctcactgtgtctgtcttctgtcttactctttttctgccggtctgtctctctctttctctctctctctgtctctctctatttgtttctctctgtctctctctgtccatctctgtctttctctgtctctttgtctgtctgtctgtatctctctttctctg

SEQ ID NO: 2677 - DNA, 174 bp, Protomyxzoa rheumatica
tccattccattccattccactccattctaccccattccattccactctgctccactctacttcagtccactccactccactccaatcctttctgttatactccactccactccagtccactccgttttactccacttcattccatttcacaccaatccattccattgcattcca

SEQ ID NO: 2678 - DNA, 182 bp, Protomyxzoa rheumatica
ttcaattctccattcgactccattccattccattctgttccatccaattcctttccattctattcttttccattccattccaatccattctattccattcgttttcattccatttgagtcctttccattcctttccattccattcaagttcattccattgcagtccattccattccagtcca

SEQ ID NO: 2679 - DNA, 161 bp, Protomyxzoa rheumatica
atggaatcatctaatggacacgaatggaatcctcatcgaatgcaatcaaatgtaatcatcaaatggaatggaatggaatcatcattgaatggaattgaatgtattcatcgaattgcatcgaatggaaccattgattggaatagaagggaatcatcatcgaa

SEQ ID NO: 2680 - DNA, 149 bp, Protomyxzoa rheumatica
ggagcacagtggagcagagtggaacggggtgcagtggaatggaacgaaatggaatggagtggaatggaaaggaatggaatgcagtggaacggaaaggagtggagtggaatggaatgtagtggtgtggaatggatagcaatggattggaa

SEQ ID NO: 2681 - DNA, 225 bp, Protomyxzoa rheumatica
ccattccattccattccattccagtccattccattccactcaaatccactccaatccattccattccactcaactctactccattcttttccactccattcctccccactctaccccaatccactccactccactccactccagtccaatctcctccattccactccattccatttcattccatttctcttcattccattcttatccctttcattccattccatt

SEQ ID NO: 2682 - DNA, 126 bp, Protomyxzoa rheumatica
gcatggaatggaatggagtcaactggaatggaatggaatgcaatgcaatcaacaccagtggaatgaaatggaaaggagcggaatgcacaggaaaggaatggaaaggaactgaatgtaatggaatct

SEQ ID NO: 2683 - DNA, 196 bp, Protomyxzoa rheumatica
tggactggcgtggaatggaatggattcgaatggaatggagtgcaatggaaacgaatagaaaggaatggaaatgaatggactcgcatggaatggaatgtaacagaatggaatgtactcgaatggaatggaaggtaatggaatgaaatttattcgaatggaaaggaatggaatagaatggaatggaatggaatggaat

SEQ ID NO: 2684 - DNA, 194 bp, Protomyxzoa rheumatica
tggaatggaatggaatggaatagaatggtactgaatctacccgagtggaatggaatggaattgaatagaatggaaatgaatcaacacgagtggaatggaatggaatagaaaggaatggaatggaatggaatattatggaattgaaacaacacggaaggaatggaatggaatagaatgtaaatgaatcaactcca

SEQ ID NO: 2685 - DNA, 150 bp, Protomyxzoa rheumatica
acatcaaatgtaatcaaactgaatcatcaaatggtatcgaatggaatcatcatcgaatggactggaatggaatcaacatcgaatggaatggaatggaatcatcgaatgaactcgaatgtaatcatcatcgaatggactcaaatggaatta

SEQ ID NO: 2686 - DNA, 143 bp, Protomyxzoa rheumatica
ccattagatgatgattccattaaattctattcgatgatgattccatttgattccattcaatgacgattccatttaattccattcaattgtcattccactcgattccattcgttgattccatttgattccattcgttggtgatt

SEQ ID NO: 2687 - DNA, 127 bp, Protomyxzoa rheumatica
gactctaatggaatggacacgaatggaatggaatggaattgaaaggaatggactgtaatggaatggaaaggaatggaggaaaggaatcgaaaaaaggaatggagtggaatggaatggactcgaatgg

SEQ ID NO: 2688 - DNA, 138 bp, Protomyxzoa rheumatica
attccatttgatgagtcaattcgattcgttttgatgattcccttcaattccattcgatgataattccattcaatcccattcgataattccatttgattccattcattgacaattccattgcactgcattcgatgatga

SEQ ID NO: 2689 - DNA, 151 bp, Protomyxzoa rheumatica
ccattccattccacttgatcaagttccattcacatacattctattcgaaacaattacattgcaatccattacattagagtccattctcttccagtccattccattcctgtccattccatttgattgcattccattcgattccattccatat

SEQ ID NO: 2690 - DNA, 439 bp, Protomyxzoa rheumatica
ccattcgagcccattcctttccattatattccattcgagtgtattccatttcattcctctttagtccattccattccattccattcgactccattccaatccattacattccattcgagtccattccatttcattcaagtcctttccattccatttcattcgagtccattccattccactccactctattccattcaagtccattcctttccattccactccactccattccattccagtccattccattccattcgtgtccattcaattccattcctttagagtacattccattccattcctttctattccattccagtctattcaattccattccacttgagtccattctgttccattccattcgagtccattccaatccattcattacattcgagtccattccattgcattcgagtcctttccattccatttcatt

SEQ ID NO: 2691 - DNA, 161 bp, Protomyxzoa rheumatica
ttctatttctttccattcaagtccatgccattccattccattccattccgttcaattccattccattccactcgagtccattccgttccattcaattccattacatcccattcgaatccattccatttgattccacttgactccatagcattccatttcat

SEQ ID NO: 2692 - DNA, 394 bp, Protomyxzoa rheumatica
cctttccaatccattctattccattaaattctattccattcctttcgattccatttcagtcaattccattccattcgattccattccactccaggccatttcattcgagtccgttccattccattaaattctattccattctattccactccattccattccattcttttccattccattcctttcctttcaggaccattccattcctgtccattccattcgaatccattccattccatttgattccattctgttcgattccattccattcgattgcattccattccagtccattcctttcgaatccattccgtttccattcctttcgtttccattcctatccattcgagtccattccattccactcgattctattccatttgattccattgca

SEQ ID NO: 2693 - DNA, 149 bp, Protomyxzoa rheumatica
ttccattccactcgattctattccatttgattccattgcattcgagaccgttccattccgttccattcaattcgattccattccattcgattccatttcattctattgcattccatttgattccattctattcgtataaataccattcg

SEQ ID NO: 2694 - DNA, 364 bp, Protomyxzoa rheumatica
ggaatggaatggagtggagtggagtggaatggaatggaattgagaagaaaggtatggaatggaatgcagtggagtggagtggagtgggatgggatggaatggagtggaatgcagtggagaaaattggagtggggtggaatggcatggaatggaatgtaaaggaatggagataaatggaatggagtggaatggaatggagtgtagtggaatggaaaggaatggagtcgagtggaaaggaatggaatggaatggagtggagaggagatgaatggattggagtggagtggagtggagtgaagcagagtgctgtgaaatggagagaagtggagtggagtggagaagaatggaatggagtggagtggag

SEQ ID NO: 2695 - DNA, 195 bp, Protomyxzoa rheumatica
ccattccactccactccattcaactccactccactccatttcattccattctactccacttcactccactccatcccattcctttccaccccactccactctacttcattccactccattccattccattccattcattccattccattggatttcattcccctccattccgttccattccactccactccactc

SEQ ID NO: 2696 - DNA, 145 bp, Protomyxzoa rheumatica
gagtggaatggaatggaatggagtggaatggaatggagtgtaatagaatggaattcaatggataggtatggaagggaatggagtggaatggaaaggcatggaagagaatggaatggaatggaaaggaatggaattgaatggaatg

SEQ ID NO: 2697 - DNA, 129 bp, Protomyxzoa rheumatica
tccattccattccactgcactccggtccactccactcaactccactccactccactcaacctccactccattctattctgttcccttccattctgtaccattccattccattccactccactccattcc

SEQ ID NO: 2698 - DNA, 144 bp, Protomyxzoa rheumatica
ttccattccattccatgccatgccattccattccattccattccactgcactctgattaactccacacaactccattacattccattccacaacactccattctgttccattccactctattctgttccattccattccattcc

SEQ ID NO: 2699 - DNA, 192 bp, Protomyxzoa rheumatica
gaaccagaatagaaaggaatgaaatggaatcaacccgattggaatggcatggtatggtaaggaaatgaatggaatgcaatggtatgcaatagaatggaatggaacgaaatggaatgaaatggattcaacccaaatggagtggaatggaatgaaatggaattgtgtggaatggaatggaatggaatggagtgt

SEQ ID NO: 2700 - DNA, 135 bp, Protomyxzoa rheumatica
aggaaagaaatggagtggaatgaaaggaacgatacagaatggaatggaatgaagtgtagtgtagtgtagtgtagtgtagtggagttgagtggaatggatcggagtgcagtggaattcaatggaatggaatggaat

SEQ ID NO: 2701 - DNA, 136 bp, Protomyxzoa rheumatica
aatggaatggaatggagaggaatgaaatggaacggaatggaacagaacataatggaatgaaatggcctcgaatggaatggaatgcaatggaatggacacaaatgaaatagaatggaactgaaaagaatggaatgga

SEQ ID NO: 2702 - DNA, 251 bp, Protomyxzoa rheumatica
agtccattccattccattcgagtccattccattccattcccatccattccttttgattcccttcaattccattcctttccattcgagtccattaaattccattccattcctttcgattccattacactccattccattcgagtccattccattccactccattagattcgaatccattccattctattccatttgaatccgttcctttccattccattccatttgagaccataccattccattccattcca

SEQ ID NO: 2703 - DNA, 144 bp, Protomyxzoa rheumatica
aatggaatggaatcaactcgagtggaatggaatggtatggattggattggaatacaatgcaatggattggaatggaatcattccgagtggaatggaagaaagtggaatcgagtggaatggaaaggaatggaaacaacccgagtg

SEQ ID NO: 2704 - DNA, 126 bp, Protomyxzoa rheumatica
agtggagtggagaggtgtcgactggaggggaacggaggggagtggagtggaatgtagtggagtgtagtggaatggggtggaattgagtggaatggaatggaagggaagagtatggaatgcaatgaa

SEQ ID NO: 2705 - DNA, 156 bp, Protomyxzoa rheumatica
ccattccattccattccattccattcgtttccactccattcaagtgcattccactccagtccattccattcgagtccattccatttcattgccttccattccatatctttctattacactccattccattcaattctattccattctattccatac

SEQ ID NO: 2706 - DNA, 169 bp, Protomyxzoa rheumatica
tccattccattccacacgagtcctctccattctattccactccatttcaatccattccattccattcgagtgcattcctttctattccattccattctattacattccattccattcgagtccattcccttccattccattcaattccattccactccattccattcca

SEQ ID NO: 2707 - DNA, 212 bp, Protomyxzoa rheumatica
gtcaattccattccattccaatccattctattccattcctttcaattccatttcattcgattccattctctttgggtgcattcctttccattccattccattccattccatgagtccattccattcccttccattcctttacagtctattccattctgcttcattccactccattccacaccaatccagtccattccattcccttccactcc

SEQ ID NO: 2708 - DNA, 217 bp, Protomyxzoa rheumatica
ttcaattcgattccattccaatcgattgcactccgttccattccattgcattccattctatttcattcaattgcattccattccttaccatttgattacattccattcaattccattcaattcgaatcaattatattgcaatccattacattcgagtacgttctataccggtccataccattccgctccaataccttcgattccattccattcgatt

SEQ ID NO: 2709 - DNA, 206 bp, Protomyxzoa rheumatica
gaatggaatggaatggactcgaatggaatggactcgaatgaaatagagcacaatggaatagcatcaagtggaatgcaatggaatggaatggatgcaaatgtaatggactcgaaaggaatggaatcaaatagaatggacccgaatggaatggtctcaaatggaatttattcgaatagaatggaatggaatggaatgcaatattttgg

SEQ ID NO: 2710 - DNA, 213 bp, Protomyxzoa rheumatica
gactggaatgtagtgcagtggagtgcagaggagtggagtagagtggaattgattggagtggagtggactgaaatggaatggaatgggatagagtggagtggagttgagtggaatggaatgggatggaatggattggagtggagcggaatggaatggagtggaatggattggattggaatggaaaggagtggagaggagtggaatggagtggaa

SEQ ID NO: 2711 - DNA, 158 bp, Protomyxzoa rheumatica
actccactgcactccaatccattcgactccactccatgccgttccattccactccaatccattccattccattcctttccgttacactccattccatttcattcgactacactccgttccattccattccactgcactccgtttcattgcataccact

SEQ ID NO: 2712 - DNA, 177 bp, Protomyxzoa rheumatica
tggaatgtaatggaatcgaagggaatggaaacaacccgggtgcaatggaatggattggaatggaattgtatggaaaggaaacaactggaatggaatggaaaggaatggaatagaatggaatagaatggaaagagatggaacggaatcaacatgattggaatggaatggaatggaatg

SEQ ID NO: 2713 - DNA, 125 bp, Protomyxzoa rheumatica
aagagacagagagagaaagacagagacagacagagggagacagagagaaacagagacagagagagagagaaacaggcaaggagagagagagacaggcagagaaagacagtaagacagaagacaga

SEQ ID NO: 2714 - DNA, 127 bp, Protomyxzoa rheumatica
ccattccgttgcattccattccactccactccactgcactccatttgattccattccttcccattccgttccatgtgattccattccactccactccagtcccttgaattccattccaccccattcc

SEQ ID NO: 2715 - DNA, 174 bp, Protomyxzoa rheumatica
ggaatggaatgggatggaatggaatgcagtggagtggagttgagtggagttgagtggagtggaatggagtggaatggaaaggaatggaaagaaatggaatggactggagtagagtggagtggagtagaatggagaggaatggaatggagaggagtggaatggaatggaatggaa

SEQ ID NO: 2716 - DNA, 183 bp, Protomyxzoa rheumatica
ggaatgtagtggaacagaatggaatggaatcatctggaatgcaattcaatggaaaggaatggaatggaagggaatggaatggaatggtatcaacgcgaatggcatggaatggaatgaaattaaatggaatggaatcaacccgagtggaatggaatggaatgacaaggaatggaatgcaatgga

SEQ ID NO: 2717 - DNA, 137 bp, Protomyxzoa rheumatica
gaatggacttgaatggaatagaaagggatggaatggaatgaatttaaacagaatggaatggaatcgactccaatggaatggaaaggccacgaattgaatgatatggaatggaacagactggaatgcaatagattgga

SEQ ID NO: 2718 - DNA, 150 bp, Protomyxzoa rheumatica
cattccactcgtgttgattacattccattccattccattctgtttcattccattcgattctgttccattccattgcatttcattccattgcactccattcgattcctttccattccattgcattcgggtagtttccattccattccattc

SEQ ID NO: 2719 - DNA, 127 bp, Protomyxzoa rheumatica
gaatggcatcgactggaatgctgtgaagtggagtagagagaagtggaatgcagtggaatggaatagagtggaatggaattgaatggaatggagtagattggagaagaatagagtggaatggaatgag

SEQ ID NO: 2720 - DNA, 165 bp, Protomyxzoa rheumatica
gagtggaatggaatggaatgcaatgaaatggtatggaatggttggaatggaaaggaatggaatcaaaacgagtggaatttaatggaatggaaacgaatggaatagaatggaatggaaacaaccccagtggaatggaatggaatggaatgcaaaggaatggtatgg

SEQ ID NO: 2721 - DNA, 161 bp, Protomyxzoa rheumatica
attcgaatccattcctttccattcctttccattccactgtcctccaatccactccactcaactccactacactccactacactccgttacattcctttccattccattcctttccattgcattccactaaattccattccattccacacctctacattgca

SEQ ID NO: 2722 - DNA, 288 bp, Protomyxzoa rheumatica
ccattccattccactctattccattccattccatttcgttacactccattccattccactccattccattccactctactccatggattttcattccactccactccattccattccattcctttccaatccattccattgtattccattccactgcactccactccattccattccattttactcgaccccactccactccactccattctattccatgatcttccactccactaaattccattccactcctctccactccattccattccattccactccactcca

SEQ ID NO: 2723 - DNA, 166 bp, Protomyxzoa rheumatica
tcgaatggaatgtagtggaatagaatggaaaggactcgaatggaagggaatggacacgaatggaatggaatggaatcgactcaaactgaatggaatggactcgaatggaatggaatggaatggaattgagtctaaaggaattgaatggaatgtacccgaaaggaat

SEQ ID NO: 2724 - DNA, 134 bp, Protomyxzoa rheumatica
atgaaatggaatggagtggaattgaatggaatgggatggaacggattggagtggagtggagaggaatggaattgagtggagtggaagggaatagagtggaatggcctaaagtgtaatgcaatggaatggaatag

SEQ ID NO: 2725 - DNA, 367 bp, Protomyxzoa rheumatica
tccattccattccactccacttcattccattccattccattccattccgctccaatccattccattgcattccactccattccattacattccacttcactccattacattccactcgactccactgcattccattgcattgcattctattccattccactccattcaattccattccattccgttctggtccattccattccattccattgcactccattccattccactccattcctctccactactcttcactcctctctactctgttcaattccattccattccattacattgcactctgatccactccacgcaactccactccattgcattccgttccattctgttccattctgttccgttc

SEQ ID NO: 2726 - DNA, 397 bp, Protomyxzoa rheumatica
ttccattccactccactccactccactccactccattccagtccattcctctccacatcactccattccactccactccattccattccaatccacttcactccaatgcacttcattcctttccatttctctccattcccttccactccactctactcctctccaccattccattccactccacttcattccattcaactcctctccattacattccactccattccactccactccacttctttccaatcaatgcaagtccattccactccatgccactccattccactcctctccattccactccattctgttccactcctttctatttcactccattccattccactccgcgccattttattccactccacttcattccattccactccattcc

SEQ ID NO: 2727 - DNA, 162 bp, Protomyxzoa rheumatica
ggaatgggatggaattgaatgccatggagtgaggtggagtagagtggattgtagtggagtagagtggaatggagtggagtgaaatggaatggaatggaaaggaatggaaaggaatgcagtgaaatgcaatggaatggaatggaatgcaatggaatagaatgg

SEQ ID NO: 2728 - DNA, 270 bp, Protomyxzoa rheumatica
ttccattccattccactccgtttgattccattccatttgattgcatttcattcccttcgaatccattccattcgattccattccattcgattgcattcctttcaagtccattccattggagtccattccattagagtccattccatttcagtccattccatttgattcgattccaatccattccattctcttccattccattccatgtgaaaccgttcccttccagtccatttcattcaattcctttccattagattccattccattcga

SEQ ID NO: 2729 - DNA, 130 bp, Protomyxzoa rheumatica
ttgattccattccattctattccatccagttccattccattccattgcaatccattccattccaatcgcgttgattcaattccgttctgttccattcaattccattccattccactacattacattacat

SEQ ID NO: 2730 - DNA, 146 bp, Protomyxzoa rheumatica
gaataaattgaatgtaatcgaatggaatggaaacgattggaatgtggtgaagtggagtgcagtggagtggaatggagtggaatggaattggttggaatggaattgaatggagtggagtggagtggaatggattcgaatggaatgga

SEQ ID NO: 2731 - DNA, 490 bp, Protomyxzoa rheumatica
ccattccatgccgttccattccattccattccattccattcctttaaattcgtttccactctagttgattccattccattccattccattccattctataccgttatattacactcgaattgattccattctattccattccattccattccattccattatattacgttacatttcattccactcgagttgattccatttcattccattgcattccattccattccattccacccggattgattcccttccattccattattatccattccattccaatccattccactggcgttgattccattccattccactccattccattccagttgattctaatgccttccactgcattacattccattgctttccattccattccattccactcagtttgattccattccattcctttccacttgtgtttattccactccattccattccattccattacagtccattccactccattccactcgggttgatt

SEQ ID NO: 2732 - DNA, 172 bp, Protomyxzoa rheumatica
ccattccattccattccattccattccattccattccacttcacccctctccactgcactccactccacttcattccattccattccactacattccactccagtccactccattcaactccactctactttattccattccatcgcattccattccactccatcccactcc

SEQ ID NO: 2733 - DNA, 160 bp, Protomyxzoa rheumatica
ttgattccattccattccattccattacattccattccataccattccattccattaaactccgtttaaatgaattccagtctcttccattccattccattccattccactcgggttagttccatttcattccattccattccattccattccattatat

SEQ ID NO: 2734 - DNA, 193 bp, Protomyxzoa rheumatica
gaatggaatggaatggaatggaatggaatggaatcaaccctagtggaatggaatggaatgaaatcaaactgagtggaatggaagggaatggaatgcaatggaatgtaatggagtggaaggcatttgaatcaactggaatggaatggaaaggaatggaatggaatggaatcaaccccagtggaatggaatggaa

SEQ ID NO: 2735 - DNA, 145 bp, Protomyxzoa rheumatica
gtagagtggagttgagtggaatggagtggaaaggagtggaatggaatcagtggactggagtggagtggaatggaatataatggaatggaatgaaatgaaatggaatggaatggagaagagtggaattgagcggagtagagtggag

SEQ ID NO: 2736 - DNA, 206 bp, Protomyxzoa rheumatica
ttccattccattccattccactagggtggattccattgcactccattccaatccattccattgctttcattccattccactggggttgattccattccatttcattcctttctatttcattccattccattactctggggttgattcaattccgttctattccatgccattccattccattccattgcattccattccattccatt

SEQ ID NO: 2737 - DNA, 297 bp, Protomyxzoa rheumatica
tggaatggaatggaatagaatggaatttaatggaatcaacctgaatggaatggaatggaatggaatggaatcaacatgagtggaatgaaatggaaaggagcggaatggaaaggaaatgaatggaaaggaactgaatgtaatggaatcgaatggagtggaattgaatggaacggaatggaatcaatatgagtgaaatggaatggaatggaacggaatggaggggaatggaatggaatggaatggaatgcaatggaatcaatgcgagtgcaatggaatggaacagaatggaatggaatg

SEQ ID NO: 2738 - DNA, 123 bp, Protomyxzoa rheumatica
ttccattccattccattccgttccattccatttcattccaattgggttgattccaatccattttattccattgcattccattccattcccctcgtttccattctattcctttctattccactc

SEQ ID NO: 2739 - DNA, 148 bp, Protomyxzoa rheumatica
atggactcaaatggaatggagggtaatggaattgagtggaatggaaaggaatttaaaggactcaaatggaacggaatggaattgaatggacccaaaagttatggattggaatggaatggaatggactcgaatggaatggaatggaatg

SEQ ID NO: 2740 - DNA, 293 bp, Protomyxzoa rheumatica
ggaatggaatggaacagacacaaatggaatagcttggaatggaatcgaatctaatagagtggaatggaatggattcgaatggaatggagtgtaatggaatcgaacggaaaggaatggaatttaatggactacaatggaatggaatggaattgaatggactcaaaaggaatggaattgaatggaattcaatggaatggaatggactcgaaaggaatggaattgaatggaatgcaaaggcattcaatggaatggaatggaatggaatggaagggaatggattggactcgaatgga

SEQ ID NO: 2741 - DNA, 167 bp, Protomyxzoa rheumatica
tcaacacgagttgaacggaatggaatggattggaactgaatggaatggaatggattggaactgaatggaacggaatggaaaggaatgaaacagaatggaattgaatctaccggagtggaatggaatcgaatggattggaatggaatggaatggaatggaatggaatg

SEQ ID NO: 2742 - DNA, 188 bp, Protomyxzoa rheumatica
ccattccatttgatttgattcgattcctttccattctaatccattccattccattaaattctattccattccattctattccatttcattcgattccatttcattcgattccatttcattcaattccattccattcgattccattccatccaggccatttcattcgagtccgttccattccattaaat

SEQ ID NO: 2743 - DNA, 163 bp, Protomyxzoa rheumatica
cattccattgcattctattccatttcattccattgcattccattcctctgcattccattccattgcattccattccattgcaatgcattcaatcccattccttcccattccatcctattccattccactccattccactatattccactccactccactccat

SEQ ID NO: 2744 - DNA, 132 bp, Protomyxzoa rheumatica
ctttccattccattccattccattccattagatgctattccattccattctgttccaatggactccattccattccattccgttccttccaattccattcttttctattcctttctcttccaatccattcca

SEQ ID NO: 2745 - DNA, 170 bp, Protomyxzoa rheumatica
cattccattccatccctttctattccattcaagtccattccaatccataccataccatcccattgcattccattccatttcattccatcccattccattccattccacttggattgattgcattccattttactccattccattcaattgcattccatttcattccattc

SEQ ID NO: 2746 - DNA, 146 bp, Protomyxzoa rheumatica
aaattccattccattccattccactcaatttaattcaatttaattctattccattccattccattccattccactcgggttttatcaattccattctattgcatttcactccgttccattccattccattccattccattccattc

SEQ ID NO: 2747 - DNA, 130 bp, Protomyxzoa rheumatica
gcattccattccattccactctggttcattccattcctttccatttcattccattctattcaattccgctcgtgttgatttcattccattcaattccgttacattccactcgggttggctccattccatt

SEQ ID NO: 2748 - DNA, 154 bp, Protomyxzoa rheumatica
tccaattgattccgttgctttacattcctctccattccattccattccattctattccattcctttacactccattaaattccactccactcaattctattccactccactcccatccattccattccattccattccattccattccattcca

SEQ ID NO: 2749 - DNA, 124 bp, Protomyxzoa rheumatica
ggaatggaatggaatggaatggaatggaatggaatggaagcgaatggaacggaatgggttgtacccgagtggaatgtaatataatggaattttatggcgtggaatggaatgaaacggaatagaa

SEQ ID NO: 2750 - DNA, 220 bp, Protomyxzoa rheumatica
gtggaatggaatggagtggaatggattggagtggaatggaatggaatggaaagaatggaatggagggcagtggaatggattggattggagtggaatggagtggaatggagtggagtgtagtgaaaaggaatggaatggagtggactggaatagagtggtatggaatggaacggagtgcagtggaatggaatggaatggaatggaatgaaatgaaatggaa

SEQ ID NO: 2751 - DNA, 182 bp, Protomyxzoa rheumatica
tcaccccattccattccactccataacactccactccactccactttaccacattactttcgattccatggttgacattcgactccattcaattcattccattcgatttcattcgatttctttcctccactcgattcgacttgattcaatatgattcaattcgatttgattccctgccattt

SEQ ID NO: 2752 - DNA, 143 bp, Protomyxzoa rheumatica
gcattggaagggagtggaatagaatggaatcaactcgacttgaatgcaatggaatgcaatgcaatggaatggaatggaatggaacggattgcaatgcagtgaaatggaacgcaatagaacagaaaggaatggaatggaatgaa

SEQ ID NO: 2753 - DNA, 173 bp, Protomyxzoa rheumatica
gaatggaacagagtggagtggaggggaatggaatagagtgggaaggaatgcagtggaatggaatgaagtggagtggagtgcaaaacaatgaagtggaatggagtggagtgaaatggaatggaacagattgtattagaatggaatggaatggaatggaatgcaatggaatggaa

SEQ ID NO: 2754 - DNA, 157 bp, Protomyxzoa rheumatica
tggaatgaaatggaattgaatggaatggaaaggaatggagtgggatggaatggaaacaaattgaatggaatggaatgacatggaatggaatcaaagggaatggaatcgaatgaaatagaatctaatggaatggaatggaatggaatggaatggaatg

SEQ ID NO: 2755 - DNA, 123 bp, Protomyxzoa rheumatica
attccattccactccactccactccactcaactcaactctactcaactccactccattccgttctattccactcaaatccattccattccattaaattccttaccattccattccattccatt

SEQ ID NO: 2756 - DNA, 141 bp, Protomyxzoa rheumatica
gaatgcaaaggattggaatggactggaatgaaattgaatgcagtggagtatactagaatggaattgaatggaatggaatggaccttatttgaatggaatggaatggaattgaatcgaatggactcgaatggaatggaaagg

SEQ ID NO: 2757 - DNA, 168 bp, Protomyxzoa rheumatica
ccattccattccatttcatttaattccattgcattccgttccattccattcagttccattccaatcctttccattccatttcattacattcctttccacaccactctaatccactccactccactccacaccactactttccattctattccattccattaaattcca

SEQ ID NO: 2758 - DNA, 146 bp, Protomyxzoa rheumatica
tggagtggagtggaatggagtggaatgcaacagagtggaaaggagtggagaggaatggaatggaaaggtggtgagtggagtggaatggaatggagaggaatggaatagagtggaatggaatggagtgcagtggagtggaatggaaa

SEQ ID NO: 2759 - DNA, 135 bp, Protomyxzoa rheumatica
tccactccattccacttcactccaataaactccactccactcctttccattccttcccattccatttcactccattcctctccacaccactccagtccactccattccacttcactccaataaactccactccac

SEQ ID NO: 2760 - DNA, 130 bp, Protomyxzoa rheumatica
cagtggaatggaatggaacggagtggaatagagtggagaggaatggattggagcggagtggaatggaaaggaatggagtggaatgtaatggaattgaatggaacgcaatggaatggaaaggagagtagga

SEQ ID NO: 2761 - DNA, 245 bp, Protomyxzoa rheumatica
ccactccattccactccacttcattccactccactccactccatttcaatccactccattcaattccactcaactccacttcactccactccactccattccactccactccactccagtgttctccattccactgcagtccactccattccactctgttccattccactgcactcaactcccctccactccactccaatccactatattccattctattccattctacacctttccactccatt

SEQ ID NO: 2762 - DNA, 135 bp, Protomyxzoa rheumatica
gtccattccattcaagtccattcctctccagtccattccatttcactccattcaattccattacatttcattcgattccattccatttgattccgtttcatttgagtccattccattcctgtccaacccatttga

SEQ ID NO: 2763 - DNA, 126 bp, Protomyxzoa rheumatica
gtccatatcattccagtccattccattcgattctattcaatcgattccattccatactattgcattctattcaattccattctatttgaataaattccattcgtgaccattcctttcaagtccatt

SEQ ID NO: 2764 - DNA, 524 bp, Protomyxzoa rheumatica
gactggaatggaatggtctcgagtggaagggaatggaatggaaaagaatggaatggaatggaatagaatggaatgcaatggaatggaatggaaagtaattgaatgcaatgaacaggaacagactggactcgaatggaatggactcgaatggaatgcattcaaatggaatggacttgaatggtcttaaatggaatggactcaaatgcaatggtctccaatggaatggattaaaatgaaatgcagtcgaatggaatggaatcgaatggaatggaagcgaatggagtggaaaggaatggaatggactggaagggaaaggactgcaatggaatggactcgaaaggaatggactggaatggaaaggactcgaaaggaatggattcgaaaggaatggaatggaatggaatggaatcaaaaggaatggactagaatggaacagtctcgaatgcaatgcaattcaatggaatggaatcaaatggattgtagtggattggaatggactcaaatggaatggacaggaatggcaa

SEQ ID NO: 2765 - DNA, 162 bp, Protomyxzoa rheumatica
attccattctattccattccatgccatttcattccattccattccattccagttgattcaattccattctatttcatgtcattccattccattgcattccactcgattacattccattccattccactccagatgtttcaattccattctattccattccat

SEQ ID NO: 2766 - DNA, 153 bp, Protomyxzoa rheumatica
gagtcaaatgaaatagaatagaatggaatggaatggaatggactcgaatggaatgtactcgaaaggaatagaatagaatggattggcatcgaatggaatggaatggaatgaattgcaatggaatggaatggacccaactggaatggacacgaa

SEQ ID NO: 2767 - DNA, 305 bp, Protomyxzoa rheumatica
tattcctttcctttccgttccattccattccattccattgcactcgggttgattcaattccattccattccgtcccattccattccattccattccattccgttcgtcttgattcaaatccattctatttcatttcactacattccattacaatccattccattccattgcattccattccattccattcctatcttttccattccattccactcgagttgattccagtatattcttttccattccattccatttcctttcattccactcggggtgattccattcctttccattccactcgaata

SEQ ID NO: 2768 - DNA, 270 bp, Protomyxzoa rheumatica
attcaattccattcccttccgttccaatccattccattccgttccattcttttaatttcctttgcattccactcgggttgattctattccactctattccattccattccacaccattccattctattcattccattccagtccacttgggttcatccaattccattctaatccattccattccattccaatccattccactccagtcgggttgactgaattccattctattcatttccattccattccattccattccattccattcca

SEQ ID NO: 2769 - DNA, 143 bp, Protomyxzoa rheumatica
atttctttcaattccattccatttgattgcattcgatttgaattcattccattgttgtccattccattctattccatgccatttcattcctttccattccatgccattccattccattagattccattccattccattccatt

SEQ ID NO: 2770 - DNA, 133 bp, Protomyxzoa rheumatica
atggaatggaatggaatggaatgcaatagaatggaatggattcaactagagtggaatggaaaggaactgaatggaatggaatggaatgccatagaatggaatagaatcaactcgagtggaatggaatggaatg

SEQ ID NO: 2771 - DNA, 195 bp, Protomyxzoa rheumatica
aatggaggggaatggaatgtaatggaatggggtggaatagaaaggaatgaaatggaggggaatggaatggaatggagtggggtggaatagaaaggaatgaaatggaatggagtggagtggagtggaatggactggagttgaattctatggaatggagtggattggaatggaatggattagaatggaatggaacgg

SEQ ID NO: 2772 - DNA, 173 bp, Protomyxzoa rheumatica
ccactcccctcaggttgattccattccattccattccattcaactctggtagattctattccattccgttccaatccctcccattccattccactcacgttgattccattccattctattccattccaaacctttccattccatgccattccattccattccattccattcca

SEQ ID NO: 2773 - DNA, 152 bp, Protomyxzoa rheumatica
cattccattccattccattccattccatttcattccactggtgtttattccattcatctccactccattccattccattccattcgggtttattccatttcattctgttccattccattccattggtgttgattccattccattccattcca

SEQ ID NO: 2774 - DNA, 218 bp, Protomyxzoa rheumatica
cattccattccattccactccactccatttcactccactctactccattccacttccctccactacaatccactccaatacactccactccattccactccattccactccattcattccattccaattcattccactccattccactccagtccactccattccattccactccaccgcattccactcactcccctccactccattccactccactc

SEQ ID NO: 2775 - DNA, 191 bp, Protomyxzoa rheumatica
tccattcaataccattccgttacttctgagtccatttcattgcattccatttgagtccattcctttcctttccattccattagactccattccattatattccattctagtccattgcattccattccattcgagtctgtttcattccactccattctattccattcgagtcagttccattccattccagt

SEQ ID NO: 2776 - DNA, 143 bp, Protomyxzoa rheumatica
cattccattccattccattccattccaatccattccgttcaggttgattctattccattccattctattccattccattccattccaatccattccaatctgtttgattctattccattccattctattccattgcattccat

SEQ ID NO: 2777 - DNA, 156 bp, Protomyxzoa rheumatica
ggaatggaatggactcgaatggaatggactggagtggaatcgacgcgaatggaatgaaaacgaaaggaatggaaaggaatggaacggaatggaatggaatgcaaaggaatagaatagaatggaatcggatggaacagaatggaaaggaatggagtc

SEQ ID NO: 2778 - DNA, 133 bp, Protomyxzoa rheumatica
caattccattccattccattccgttccattccattccatattccattcgagtcaattccattcatttcaagtccattccattccattccatttgattccattgtattccattccattcaattccattccattc

SEQ ID NO: 2779 - DNA, 157 bp, Protomyxzoa rheumatica
tcattccattccattccattccattccattacattctattacgttccattccattcctttacattggattggatttcgttccattccattccattgcattcaattcctttccattctattccactcgtgttgattctatagaattccactccatttc

SEQ ID NO: 2780 - DNA, 144 bp, Protomyxzoa rheumatica
ccattccattccacttgagtccattccattccattccattcgaatccattctattccatgccattccattctattccatttgggtcctttacaatccattccactcgagtccattacataccattccatccaattcgagtccat

SEQ ID NO: 2781 - DNA, 125 bp, Protomyxzoa rheumatica
ggaatggaatggaatggaatggtatggaatggaatggaatcataccaagtgcaatggaatggaaaggaatgtaatggagccacccgagtggaatggaatggaatggaatggaatgaaatggaatg

SEQ ID NO: 2782 - DNA, 168 bp, Protomyxzoa rheumatica
tggactcgaatgaaatggaatggaaaggacttgaatacaatggaatggactcgaatggaatgtaatggattggaatggtatcgaatggaatggaatggaatagactcgaatggaatataatggaaaggaatgggctcgaatggaagggaatggaacggacacgaacgg

SEQ ID NO: 2783 - DNA, 130 bp, Protomyxzoa rheumatica
ctttccactcgagttgattccattccattcttttccattacattccattccattccactcgtgattattccattctattccattccatttcactcagattgattccattccattccattacattacattc

SEQ ID NO: 2784 - DNA, 131 bp, Protomyxzoa rheumatica
aatggaatcatcatcgaatggaatcaaatggaatcatcaacaaatgtaatcgaatcgaatcatcgaatggaatctaatggaatcatcatcgaatgaaaccaaatagaatcatcatgaaatagaactgaatg

SEQ ID NO: 2785 - DNA, 141 bp, Protomyxzoa rheumatica
gttggttccgttccattccattccattccattccattccactgatcacgggtgtattctattccattccattccattacattacatttatttccattcggattgatttcattttattcattgcattccattccattccatt

SEQ ID NO: 2786 - DNA, 149 bp, Protomyxzoa rheumatica
caccaatccactccactccattccattccatcccactcccctccactccattccaatccacttcattccactccactccaatctattccactccattccactccattgtactccattctattccactccactccactccattccattcc

SEQ ID NO: 2787 - DNA, 122 bp, Protomyxzoa rheumatica
cattccattccattcgggttcattccattccattccattccgttccattccattccgttgcattccattcgtcttgattaacttccattacattccattccatcccatcccattccattccg

SEQ ID NO: 2788 - DNA, 180 bp, Protomyxzoa rheumatica
cattccattccattccattctatcccattccattccattctattccattccaattcagttgattgcattccattccttttgattccttgccattccattccattcgatactattccattctattccattccattccattttattccgttccacttcattcctttgcattcaattcctttc

SEQ ID NO: 2789 - DNA, 180 bp, Protomyxzoa rheumatica
attccattccattccattccattccattcaattcctttccattccatggcaatcgagttgattccattccattcgattcgattttattccattccattctatgccaatccactcgtgttgattccattcctttctattccattcgggttgaatccattccattgcattccattccattcc

SEQ ID NO: 2790 - DNA, 153 bp, Protomyxzoa rheumatica
aatggactggagtggagtggagtggaatggaatggagtagagaggagtggaatggaatggaatagagtggaaagaactggagtggagtggaatgaactggcgtggaatggaaaggagtggaatggaatggaatgaaatggaatggaatggaat

SEQ ID NO: 2791 - DNA, 259 bp, Protomyxzoa rheumatica
agaatggaatgggatagaatggattgcagtggagtggagtggagtggaacgcaatggagtgaaatggattggaatggaatggagtggagtggagtggaaaggaatggattggaattgagtggagtgcaatggagtggagtggaatggattggagtggaatggagttgtgtggattggaatggagtggaatggaatggagtggagtcgagtggattggtttggaatggaatggaatggaatggaatggaatagaatggag

SEQ ID NO: 2792 - DNA, 161 bp, Protomyxzoa rheumatica
caaatggaatgtaatcttatggaatgcaatagaatgtaatgtaatcgaatggaatggaatcgaaagaaatgcagtcgaatggaatggaaacaaatggaatggaatagaatagaatagaatggaatctaatggaatggaatggaatggaatggaatggaatg

SEQ ID NO: 2793 - DNA, 141 bp, Protomyxzoa rheumatica
aatggaatggaaaagaatggattctcatggaatgaaatggaatggaatggccttgaatggaatgcaattgaaatgaatggactcgaaaggaatggaagtgtttggaatggaatggaattgactcgaatggaatggacaaaa

SEQ ID NO: 2794 - DNA, 420 bp, Protomyxzoa rheumatica
ggattggaatggaatgaaatggaatggagtcaacccgaatggaatggaatggaaaggtatcaacccgactggaatggaatggaaaggaatggaaaggaatggaatggattggaatggaatcaacatgagtggaagggaaaggaattgaatgtaatgaagtagaatggaatggaatcaaagcaagtggaatggaaaggattggtatagaatagaatggaaaggaatggaatggaagcaagccgagtggaatgaaatggaatcgattggaatggaatttaatggaatccacccgagtgcaatggaacggaatgcaatggtatggattggaatggaataaacaagagtggattggaacggaatggaatggagtggaatggagtggaatggaatggaatccacccgagtggaatggaatggaat

SEQ ID NO: 2795 - DNA, 144 bp, Protomyxzoa rheumatica
attccactccactccactccactccacaccactccaccccactcttttccattctgatccattccattccgttccattccacttcattccattccactccactcaatttcactccacttcatttcactccattccactccattc

SEQ ID NO: 2796 - DNA, 157 bp, Protomyxzoa rheumatica
cgattccattccattccattccattccattccatttgatttgattacattccactccattccattccactccactctactccactcctctccattcaactccattccactgcattccaatccactctactccactcctctccattcaactccattcc

SEQ ID NO: 2797 - DNA, 215 bp, Protomyxzoa rheumatica
ccattcctttccgttccattccattccactccattccattccactataatccattttactccattacactctactccactcaactccactccactacactcctctctactgcattccagtcaactccactccattccatgccactccattccattccactccactctgctccattccattccactccattccactccactcctctccactccatt

SEQ ID NO: 2798 - DNA, 122 bp, Protomyxzoa rheumatica
catggattgcacccgaatggaatggaatgttatggaaagtaaaggactcgaatggaatggaatggaattcacccaaatggagtggaatggaatgcaatggactcgaattgaatggaacgcaa

SEQ ID NO: 2799 - DNA, 197 bp, Protomyxzoa rheumatica
tcgaatggaatggaatggaatggactcaaatggaatggaaggactcaaatggagtggagccgaatggatttgaatggaatggaatggaatggaattgaatggaatgaactcgaatggaatggaatggaatggaatgaaatagactcaaatggaatggcatggaatggactcgatggaatggaatggcataaaatgga

SEQ ID NO: 2800 - DNA, 133 bp, Protomyxzoa rheumatica
ggtatggaatgattggaatggaatggaatggactcaaaacaagtggaatggaatggaatggaaacgaatggaacggaaaggaatgttaacaaaccgagtggaatggaatggaaagcaatggaatggcatggaa

SEQ ID NO: 2801 - DNA, 201 bp, Protomyxzoa rheumatica
gtggagtggaatggagtggagtggaatggagattagtgaaattgaatggagtggagtggaggagaatggagtggactggagtggagtggagtggaatataatgaaatggaatggagtggagtgcagtataatggagtggagtggaatggaatggaatagattggagtggaatggagtggaatgcagtggagtggagtggaa

SEQ ID NO: 2802 - DNA, 122 bp, Protomyxzoa rheumatica
attcgatgatgactgcatttggttccattcgatgatgattcgaatggattccatttgatttctccattcgattacattcattgatgattccattcgctcccaatacattattattccattag

SEQ ID NO: 2803 - DNA, 129 bp, Protomyxzoa rheumatica
agtggaatggaatggactggaatggaatggaatggaatgggatgaaatagaaaagaacggaatggtatggaatggaatggactttaatggaatagaatggaatggacttgaaaggaatggaattgaatt

SEQ ID NO: 2804 - DNA, 190 bp, Protomyxzoa rheumatica
gaaaggaatggaatgcaatggaatggaatcgaaccgagtggaatggaatggaatggactcgaataaaatggaatgcagtggaatggactcgaatggaatgcaatgggatggaatagactcgaatggaatggaaagaaatgtaatttaatggaatgaaatggaatggatgggaatgaaatggaatgaaata

SEQ ID NO: 2805 - DNA, 150 bp, Protomyxzoa rheumatica
gtggaatagagtgtagtgtagtggaaaggaatggattggaatggaatggaatggaatggatttaaacggaatggagtggaatggaatggattagaatggaatggagtgcagtggatttgaatagaatggaatggaatgaagtggaaggga

SEQ ID NO: 2806 - DNA, 125 bp, Protomyxzoa rheumatica
cgaatgaaatggactcaaagggaatggaatcgaatggaattcaatcgaatggaatggaatcgaaaagaatggaatcgaatggagtgtaatcgaaaggaatagaattgaaaggatgggaatcgaat

SEQ ID NO: 2807 - DNA, 270 bp, Protomyxzoa rheumatica
tggaaaggaatggaatggaattgaatggtacggaatagaatggaatagaacgaaatggaatgaaatggattcaacccaattggaatggaatggaatgaaatggaattgtgtgtaatggaattgaatggaatggagggtaaaggaattgaatagaatcaacccgaatagaatggaatgtaatgaaatggaaaaaaatggaatggaatgtaatggaatggaatggaatagaatggaatggaatcaactcgagtggaatggaatggaatggaa

SEQ ID NO: 2808 - DNA, 208 bp, Protomyxzoa rheumatica
tggaatggaatggaaaggaatggagtggaatgaaatagaatggagtagaatggagtggagtggagttgaacggattgaagtggaatggagtggattggaatagagtggaattgagtgaaatggaatggaatggagtggaatggaagggaatagagtggaatggtatggagtggagtggagtggaatggagtgaaatggaatgaaatgg

SEQ ID NO: 2809 - DNA, 133 bp, Protomyxzoa rheumatica
attccagccttttttgacacagtgatatcccgtcgaaaggagggaatggaatggaatgcggtggaatggaatgtgatggaattgaatgaaatggaatggaatggggtttaatggaatggaatggaatggaatg

SEQ ID NO: 2810 - DNA, 329 bp, Protomyxzoa rheumatica
ggaatggaatggaatggaatggaatggaaaggaattgaattgagtggtgtggcatggaatggaatgaaaaggagtggagtggagtagagcggagttgagtggagtggatcggagtgcagtgaaatggaatggaatggaaccgagttggttggaatgaaatagaatgtaatggaatggagaggactggactggagtggaatgaagcggagtggaatggaatggaatgtaatagaatggaatggagtggagtggaatggaattgagtggaatggagtggtgtggagtggaatcgagtggaatggaatggaatggagtggagtggaatggaa

SEQ ID NO: 2811 - DNA, 122 bp, Protomyxzoa rheumatica
gaatggaatggaatgaaatagaatggaatagaatggaatgcaaagcagtggaatggaattgagtggagttcacaggagtggaatggaatgggatggattggaatggaatagaatggagtgga

SEQ ID NO: 2812 - DNA, 163 bp, Protomyxzoa rheumatica
ttctatatcattcgagcccattccattctttgccattctattccattcaagtccattccattccattctatttcagtccattccattccattcctttccatttttgtccatttcattccatttcattcgattccattccattcaattctattgcattcgggtc

SEQ ID NO: 2813 - DNA, 157 bp, Protomyxzoa rheumatica
tccattctattcaattccattccaatcccctcggtttgattccattctatcccattcgattccattccattccattcctttagattccactccattcgattccattcgtgttgactgcattgctttccattccagtctattccattcccttccatta

SEQ ID NO: 2814 - DNA, 180 bp, Protomyxzoa rheumatica
attccatttcattcgtttccattcaatttgtctgcattccactccagtccataccgttcgagtctattccattccagtccattccattcgagtccattccactcgatatcattccattatgctacattccattctcttcttttcgattccattcaattccattccattcgattccattcc

SEQ ID NO: 2815 - DNA, 141 bp, Protomyxzoa rheumatica
aatggattggaatggaatggaatggaatcaacccgagcgggaaggaatggaatggaatgcagtggaatgcaatggaatggaaaggaatcaacaggaatgcaatggaacggaatgggatgggatgggatggaatggaatgga

SEQ ID NO: 2816 - DNA, 134 bp, Protomyxzoa rheumatica
aattgaatcaagcctagtggaatggaatttaatggaatgaaatggtatagaatggagtggaatagaatgaaattgaatcacctggactcgaaacgaattgaatggaatagaatggaatggaatggaatggaatc

SEQ ID NO: 2817 - DNA, 129 bp, Protomyxzoa rheumatica
tggaatggaatggaatggaatggaatggaatggaaacaacacaagtgaaagggaatggaatggaatggaatggaatggaatgaaatcaacccgtggggaatggaatggaatggaatggaagggaacgga

SEQ ID NO: 2818 - DNA, 146 bp, Protomyxzoa rheumatica
aatggaatggaatggaattggatggaatggaatggaatggaatggaatcggttgaaatggaatgaaatggaatggagttgaacggaatagaatccaaaggaattgcttcgaatggaatggaatggaatgaaatggaatggaatgga

SEQ ID NO: 2819 - DNA, 153 bp, Protomyxzoa rheumatica
gaatggaatggaatctaatggaatggaatggaatggaatggactccaatggaatgcactggaatagaatggactcgaaaggaaaggactcgaatagaaaggacaaaaaggaaaggaatcaaaaggaatggaatcgatggcaatagaaacgaat

SEQ ID NO: 2820 - DNA, 175 bp, Protomyxzoa rheumatica
tccattccattccattccactcgggtggattctattgcattccattccattccattgcacttggtttgattcccttccattccattccattacagtccattccattcccttccattcaattccattgcatgccatcccactcgggttgattccattccattccattccattccat

SEQ ID NO: 2821 - DNA, 146 bp, Protomyxzoa rheumatica
gaatggaatcaaccagagtacaatggaatggaatggaatgcaatggaattgaacggaataaaatggaattgaatggagtcatcccgagtggaatgggattgtatgcaatgcaatggaatggaatggaacagaacggaatggaatgg

SEQ ID NO: 2822 - DNA, 140 bp, Protomyxzoa rheumatica
gaatggaatggaatggaatggaatggaatggaatgcaatagaatggtactgaatctacacgagtgcaatggaatggaatggaacggaatggaatggagttgaatggaatgtaatggaatgaattcaacaagaatggaatg

SEQ ID NO: 2823 - DNA, 194 bp, Protomyxzoa rheumatica
actctattccattccattccattccactccactcagctgcactccattcctttccattccattcttttgcactctgctgcagttcattccactccactccaatccattccagtccactccactccaatcaactccaatccattccactccactccactccattttatttcaatcctttaacttgcatttcactc

SEQ ID NO: 2824 - DNA, 95 bp, Protomyxzoa rheumatica
ttcctttccatggaattccattccattccatttctttccatggaattccattccattcctttccatggaattccattccattccatttctttcca

SEQ ID NO: 2825 - DNA, 132 bp, Protomyxzoa rheumatica
tccaatccactccattccattccactctactccattccattccactccacttcactccactgttctccattccactccactccactccactgttctccattccactgcactccactctgttccactccattc

SEQ ID NO: 2826 - DNA, 179 bp, Protomyxzoa rheumatica
gtgaagtgcagtgcagttgagtggaatggaatggattggagtgaaatggagtggaaaggagttgagtgcaatttacttgaaaggagtggaatggaatggagtggaatggaaacacaaggagttgaatggagtgtagtgtagtggagtggagtggagtggaatggaatagagtggagtgg

SEQ ID NO: 2827 - DNA, 150 bp, Protomyxzoa rheumatica
gaatggaatggaatggaatggaatggaattggatggaatggaaagaagtggcattgaatgcaatagaatcgattggaatcaactcgggttgaatggagtggaatagaatgaaatggaatggaatgtaacagaatagaatggaatcaaatc

SEQ ID NO: 2828 - DNA, 166 bp, Protomyxzoa rheumatica
gtggagttaaatggagtggagtggagtggaatggagtggagtagaatgtaatggagtggtgttgaatggaatggtgaaatgaaatgtgagctaagattgtgatattgcactaatctctgtgtgacagagtgagatccacccgaaatacaggaatcaaattgaatgg

SEQ ID NO: 2829 - DNA, 180 bp, Protomyxzoa rheumatica
ccgttcaattccattccttcccattcaattcctttccaatccattccacctgactccactccactccattcaattaaattccaccctattccattccactccattccactcctctccacttcaccaaattgttttcaaatccatttgatgcttttcgagtccattcaattcgaatccatt

SEQ ID NO: 2830 - DNA, 198 bp, Protomyxzoa rheumatica
ttccattccattccactccaatcctttccatttcactccagtccataccaatccactccattccattccactctagttcattcccctccactccactccattccactccactccactccattgcactccactcaattcaactccactccattccactccactgctctccactccactccactccagtccattccattc

SEQ ID NO: 2831 - DNA, 190 bp, Protomyxzoa rheumatica
aattgagtggagtggaatggagtggagtggaatggaatgaagtggaatggaaaaaaaaggaacagaacagaaatgaatggaaagatttggagtggagtgcagcggagtggatttgagtggagtggatctgagtgcagtggaatggaatggaatggaatgaaatgaaatggagtgaagtggagtgcagtgg

SEQ ID NO: 2832 - DNA, 81 bp, Protomyxzoa rheumatica
gaaatggagcttaccagagtggaaaggagtggaaaggaatggagtgtcataaaatggaacatggtggagttgaactgagtg

SEQ ID NO: 2833 - DNA, 149 bp, Protomyxzoa rheumatica
ggaatggaatggaatggaattgagtggaatggaatggaatagaatgcaatggaatcgaatggaatggagtggcgtggagtggagtgaattggagtgaaggggtatggaaaggaatggaatggaatggaatggaatggaacgaaaggttc

SEQ ID NO: 2834 - DNA, 231 bp, Protomyxzoa rheumatica
ttccactccattccactccactccactccactccattgcattccattcccttcaactccattccattctactccattccactgcattccactccatttccctccattccattccactccactccattccaatcaactccaatcctttcctcaacattccattctacttcactccattgcattccattccactccattccattgcattcctgtatttcgactggatctcact

SEQ ID NO: 2835 - DNA, 133 bp, Protomyxzoa rheumatica
cattccattccattgcattccattccactccactccactctactccactccaatctattccactccactccactccaatccggtccactccactctactccactccatgccagtacactccactcctttccat

SEQ ID NO: 2836 - DNA, 126 bp, Protomyxzoa rheumatica
gaatggactggaatggaatgatctcgaaaggaatggactgaaatggaattgactgaaatggactggaatagaatggaatgtattcaaagggaatggaattgaatggaatggaatcaaatggaatgg

SEQ ID NO: 2837 - DNA, 88 bp, Protomyxzoa rheumatica
cattccattccattccattccattccattccattcccttctgtttgactctattccattccattccattccattccattccattccat

SEQ ID NO: 2838 - DNA, 146 bp, Protomyxzoa rheumatica
ttaaattccattgcattgtattccatttgaatccattccattccattccattccattccatttgaaaacaatccattccataccattcaattccagtccattccattccaatcgattccattcagggtcactccattcaattctat

SEQ ID NO: 2839 - DNA, 186 bp, Protomyxzoa rheumatica
gaatggagtggaatggaatctagtggagtggaatggaatggaatggaattgactagagtgaaatagattggaatggaatggaacggagtggagtggagtgaagtggggtcgagtggaatggaatggaatttagtttagtggaatggaatggaattcaaaggaatggaatggaatggaatggaatgg

SEQ ID NO: 2840 - DNA, 266 bp, Protomyxzoa rheumatica
aaatggaatagagtagaattgaatggaatggaatgcaatggaatgaagtggaatggtggataatggagtggagtagagtggaatttagtggagtggagtatagtagaatggagtggaatggaacggaacagaatgaaacggaatggaatggaatggagcagaggggagtggagtggagtggagttgcgtggagtggatcagactgcagtggagtggaatggaatggagtggagtggagtggaatttagtggagtggaatggagtgg

SEQ ID NO: 2841 - DNA, 130 bp, Protomyxzoa rheumatica
ggaatggaatggaatggaatagaatggaatggaatggaataaacattaaggggatggaatggaatggaatggaatgggatggaatggaatggaaaagaatcaattggaatggaatggaagggaatggaat

SEQ ID NO: 2842 - DNA, 272 bp, Protomyxzoa rheumatica
ttccgtttcattctattccattccactacattccactctactccaatacactccactccattccactgcactccaatccactccactaaactccactccactcctctccattgcattctattctacacctttccactccactccactccacttcaccgcattccaatcgattccattcgatgctattcgattcgattccattccattccattccaatccatttgattcgattacattccattcgactccattccattcaattccactccact

SEQ ID NO: 2843 - DNA, 173 bp, Protomyxzoa rheumatica
atggtgtggaatcaacacgagaggaatggaatggaatggaatcttacggaaaggaattgaaaggaatggaatggaatgaacacgaatggaatggaatctattggaatgcaatggaatggaatcaacccgggcggaaaggaatggaatggaatggagtggaatggaatgtaatg

SEQ ID NO: 2844 - DNA, 134 bp, Protomyxzoa rheumatica
ccattccattccattccattccgttccattccattcctttgcattccattagggatgattctattccattgcattccattccattccattcccctgtactccggttgattccattgcattccattccattccat

SEQ ID NO: 2845 - DNA, 168 bp, Protomyxzoa rheumatica
aatggaatggaatgcaatggaatagaatggaattgaatcaaccggagtggaaaggaactgaatggaatggaatggaattgaatggaaatgaatcaacccgagtggaattcattggaatggaatggaaaggaagggaatggagtggaatggaatggaatggaatggaat

SEQ ID NO: 2846 - DNA, 214 bp, Protomyxzoa rheumatica
gaatggaatgcagtggaatggaatgcaatggaatggaatgtagtggagtggagtggaatggagtgtaatggagtggaatggaattgagaggaacggtatggaacggaatggagtggactggagtggagtagagtggagtggagtggaaaggaatgagatggagtagattgcaatggaatggagtggaatggaatgccgttaaacggaatggagt

SEQ ID NO: 2847 - DNA, 210 bp, Protomyxzoa rheumatica
atagattcaatcggaatggaatggaatgaactcgaatcgaatggaatacaatggattggactcaaatggaatggaatagaattgaatggattcgaaaggaatggaatgcaatggaatctaatgaaatggtttggaatggaatggaattgaatggaatggactgaaatggaatagaaaggaatcgaatggagtggaatggattggaatgga

SEQ ID NO: 2848 - DNA, 127 bp, Protomyxzoa rheumatica
aaggaatcaccgaatggacacgtatggaataatcatcaaaaggaatcaaatggaatcattgaatggaatcgaatggaagggaatcgattggaatagaatcaaatggaatggaattgattggaattga

SEQ ID NO: 2849 - DNA, 123 bp, Protomyxzoa rheumatica
attccattcaatttcattttttccattcgatttcattctattccattcaattccactcgattccatttgatttgatttgattcgattcgaaaccatttgattccatttgattccatttgattc

SEQ ID NO: 2850 - DNA, 132 bp, Protomyxzoa rheumatica
caaataagaatggaatggattcgaatggaatgaaatggaaagaaacgaaatggaatcaacacgagtggaatggaaaggagtggaatgtaatggaatggagtccaccagagtggaatggaatggaatggaatg

SEQ ID NO: 2851 - DNA, 263 bp, Protomyxzoa rheumatica
ccattgcattccattccaatccattccctccggttgtatcaattccattctatttcattccattcctttccattccattctttgccattccattccattccatgccattccacttgtgttgattcaattccattctattccattccattccattccactgcattccataccattccgttccattccactcgggttaaatcaattccattctactccgttccattccacaccattccattccattccatgccattccattccat

SEQ ID NO: 2852 - DNA, 132 bp, Protomyxzoa rheumatica
tggaatggaaacaaaccgagtggaatagaatggaaaggaatggaatggaattgaacggattggatttgaatggaatggaatggaagggaatggagacaactcgagtggaatggaatggaaaggaatggaatg

SEQ ID NO: 2853 - DNA, 168 bp, Protomyxzoa rheumatica
cctctccactgcattccattccactccattccattcctttccactctactcccttctattctactccattcctttcaactccactccactccattccattctatcccactgcactccattccattccattcgactccaattcatttcaatccactagtttccgttccc

SEQ ID NO: 2854 - DNA, 240 bp, Protomyxzoa rheumatica
tgaaatggaatggagtggaatggaatggagtacagtggagaggaaaggaattgaatggaatagagtggaattgaaaggattggaatttaatggaatggagtggaacggcgtggaatggagtggagtggaatgaaatggaatgctgtggagtggaatggaatggaattcaggggaatggaatggaagggactgaaatgcaacggaatggaatggaatggaatggaattgagtggaatggaa

SEQ ID NO: 2855 - DNA, 190 bp, Protomyxzoa rheumatica
tccaatggaatgaaatggaggggagtggagtgttggggtggagtggaatggtatggaattggatggaatagaatatagtggagtggagtgggatggggaggagtggagtagagtggagtggaatggaacgaaattgaatggagtggagatgagtggagtggagtggagtggagtgcagtggagtggaatg

SEQ ID NO: 2856 - DNA, 157 bp, Protomyxzoa rheumatica
attccattccattcgagtccattccattccatttcattcttgtccattccattcaattccattctcttccattcaagtccattccattccattcaatttgagaccatataatttcattccattccaatggagtacattccattccattagagtccat

SEQ ID NO: 2857 - DNA, 134 bp, Protomyxzoa rheumatica
ggagtggaatttaatggagtggagtggaatagaatagaattgagtggaatgcagtggagtggagtggacaagagtggagtggaaaggaatggagtggaatggatttgaaagagtataatggaatggaatggagt

SEQ ID NO: 2858 - DNA, 152 bp, Protomyxzoa rheumatica
attccattccattccattcgagtccattccatttcattcgagtccattccattccattcaaggccacttcattccattccattcctttccattccattcttttcgggtccattcaattcaaatgcattccattccattccattccactccat

SEQ ID NO: 2859 - DNA, 158 bp, Protomyxzoa rheumatica
tccattcgactccttttaatgatgattcctttcgatttcattcgttgatgattccattcgtttcgattcgatgatgattccattcgataccatttcatgatgatttcattcgattccattcaatcatgattcaattccatttcattcaatgattctat

SEQ ID NO: 2860 - DNA, 275 bp, Protomyxzoa rheumatica
tttactgcttcccattcgattccagtcgatgtcattcgattccattccgttcaattccattccattcaattccatgatattcaattccattccattcgagtccatgcaattccattccattccactccaatccactaaactccacttcactccacttcactccactccatcctttccattccattccattccattcccttacattccactccactccattcctttccactcccctccagtccactccattccattccatgccattccattgcatg

SEQ ID NO: 2861 - DNA, 256 bp, Protomyxzoa rheumatica
ccactccagtccatttcattcgagtccattccactccagtccatttcattccattccattccgttcaattccatttgatatctttccatttcactccgttccattccattgcattctatttaattgcatttcattccactccattccattcgtgtccattccttttcattcctttccattccattgcattctgttctacttcaatccattcgattccattttcttccagtccattccattcgagtccattccattc

SEQ ID NO: 2862 - DNA, 122 bp, Protomyxzoa rheumatica
ggagtggaatggaatggaatgcaatggagagaaatataatggaacggaatggaatggaaatggacggaatggaatggaatggaatgaatgggaatgtaatggaatggaatgaaatggaatgg

SEQ ID NO: 2863 - DNA, 135 bp, Protomyxzoa rheumatica
atggaatgtaatggattggagtggaatggagtggagtgcattggaatggagtggaggagagtggaatggaatgtagtggattggagtggcattgaatggaatgtaatggattggagtggaatggagtggagtgca

SEQ ID NO: 2864 - DNA, 160 bp, Protomyxzoa rheumatica
aatggaacagactcaaatggaatggatggactcgaatggaatggaaaagaatggaatggaatggactcgaatggaatggcatggactctaatggaatggaatgaaattgaatggactggaaaggaatgggatggaatgggatggaatggaatggaatggg

SEQ ID NO: 2865 - DNA, 170 bp, Protomyxzoa rheumatica
ccattcgtgttgattccattccattccattccattacattccattccacaccatgccattccattcctttccgctcgggttgattccattccattccattccattcgggttcattccattccattccgttccattccattccgttccattccattcgtgttgattaactt

SEQ ID NO: 2866 - DNA, 168 bp, Protomyxzoa rheumatica
ggaatggagtggaatggaatggaatggagttgagtgtagttgagtggagtggattggagtggagtggaaaggagtcgagtggaatggattggaaaggaatggagtggaatggaatggaatggagtgaaattgaatcgaatggagtggagtggagtggattggagtgga

SEQ ID NO: 2867 - DNA, 122 bp, Protomyxzoa rheumatica
gagtcgagtggagaggagtggaatggagtggattgggattggatggaatggaatggaatgtagtggagtagactggagtggaaaggagtggaatggacgggaatgtaatggaatggaatggc

SEQ ID NO: 2868 - DNA, 90 bp, Protomyxzoa rheumatica
aaacacacacacacctccaaacacacacacacctaacacacacctcctccaaacacacacacacctccaaacacacacacacctaacaca

SEQ ID NO: 2869 - DNA, 122 bp, Protomyxzoa rheumatica
tccattgcattcaattcatttccgttccattcgagtccattccactgcaatccattccatgccactccattccattcgagtcctttccattcctttcctttccattcgatatctttccatta

SEQ ID NO: 2870 - DNA, 122 bp, Protomyxzoa rheumatica
cattccattgcagtccacatcactccactacactccattccattccactccacaccattccactccaccccactccattccactccgctacactccattccattctattccattccattcca

SEQ ID NO: 2871 - DNA, 139 bp, Protomyxzoa rheumatica
ccattccattccaatccattccattcctttccactctgtttgattccattccattccttgccattcgcttccatttcatcccattccactgtggttgattccattctattccattccattcagttccactccattcgat

SEQ ID NO: 2872 - DNA, 141 bp, Protomyxzoa rheumatica
aattccattagattctattccattcaattccattctattcgactccattccattcgagtcctttccattccattggtttccattccattccgttccctttgattccaatccatttgattccattttgttccagttcattcc

SEQ ID NO: 2873 - DNA, 221 bp, Protomyxzoa rheumatica
ctcgaatggagtggaattgaatggaatagaatcaaatggaatggcattgaatggaatggaatggagtggaatggaatggacacaaatgtaatggacttgaatggaatggattcaataagaatggattcgaaaggaatggactcaaatggaatttatttgaatagaatggaatcgaatgcaatgcaatagtatggaatagaatggaatcgaatggaatggaa

SEQ ID NO: 2874 - DNA, 147 bp, Protomyxzoa rheumatica
tggagtggaatggaatggactggaatggagtgcaatggagtggagtggaatggaagggaatgaagtggagtggagtgcagtggaatggggtggagtggagtggaatagaatggaatggaatggagtggaatggaattgaatggaatg

SEQ ID NO: 2875 - DNA, 191 bp, Protomyxzoa rheumatica
atggaatcaaatggaattgaatggaatgccatggaacggaatagaatggaatgcagtggaatggaacggaatggagtggaatcaagtggaatggaatcgaaagtaattgaattgaatggaatggaatcgaatggaatggattcaaatggagtggattggaacatagtggaatgaaaaggatgggaattgaa

SEQ ID NO: 2876 - DNA, 163 bp, Protomyxzoa rheumatica
gaaaagagtgcaacagactcgaatggaatggagaggaatggaatggaatcgaatggaatggaatcgaatgctatggaatggaatggacccgaatgaaatggaatgcaaaggaatggaatggaatgcaatggaatgaaatggaatgcaatggaatggaatcaac

SEQ ID NO: 2877 - DNA, 197 bp, Protomyxzoa rheumatica
aatccattgcattccattccattcgattccattctatttggttctgttccattccagtccattccattcaattccattccattcaattccattcaatttgattctattcctttccattccattccattccaacgcattcaattccaatccattgcattccattcaattccattccattctatttgattctgttccat

SEQ ID NO: 2878 - DNA, 143 bp, Protomyxzoa rheumatica
ccatttgttgatgattccattcgagtccatttgatgattcaattcgattccattcgatgattattccatacattgattattccattccattccaattgatgattccattcgagtacattgattattccattccattccattcg

SEQ ID NO: 2879 - DNA, 152 bp, Protomyxzoa rheumatica
atggaatagaatcaaggagagtggaatggaatggaatggaacggaatagaatgggaaggaatggaatcaactacaatggaaaggaatggaatggaatggaacgcagtggaattggaatggaatggaatcaactcgtgtggaatgtaatgcaa

SEQ ID NO: 2880 - DNA, 257 bp, Protomyxzoa rheumatica
ggaatggaatggaatggaatggagtggagaggagtggagtggagtggattaaagtggagtggagtggaatgcaatggattggaatagggtggagaggaatggaatggagtggaatggaatgggagggaacggagtggagtggagtggagtggaatgaagagtaacggagtggagtggagtggaatgcaatcgaatggaatgtaattgaaaggaatgaaatggagtggaatggaatgaaatggaatggagtggagtgg

SEQ ID NO: 2881 - DNA, 171 bp, Protomyxzoa rheumatica
cattccatttcattccattccattccattccattccactagagttaattccattccgttgaattccattactttccattccaatccattccattccattccattccattgcgttccgttccactcggggtgtttccattccattcaattcctttccattccattctattcc

SEQ ID NO: 2882 - DNA, 279 bp, Protomyxzoa rheumatica
ttcaattccattccttccctttccattccattgcactccaatccactccactccaatccttttgaatacattccacccattccattccacttcattccacttcactccactcaacttcaccgcattccattcgattccattaaattatatttgatgcaattcgattccattccgtttgatttcattccattcgattccattccattcgagtccattcctttcaaatcctttccattccattccgttgcattccattccatttcattccattcgacacca

SEQ ID NO: 2883 - DNA, 162 bp, Protomyxzoa rheumatica
aaatggaatggaatgaaatggaatggaatggaataggatggaatggaatgagatggaatggaagggaatggaatagaaaggaatggaatgcaatcaactgtaaaggaaagtaatggaatgaagtgaaatggaatggattcaacccgagcggaatggaaagca

SEQ ID NO: 2884 - DNA, 157 bp, Protomyxzoa rheumatica
agaatggaatgaattcgaatggaatagaatggattcaaatggaatagaatggatacgaatggaatggaatggaatggattaaaatgaaatggaatggaatggaatggaatcgactcgaatgaaatggaatgcagtggaatggaccggaatggcatgc

SEQ ID NO: 2885 - DNA, 140 bp, Protomyxzoa rheumatica
gaatggaatggaatggaatggaatggaatgcaatggaatataatcaaccagagaggaatggactggaatggattggaatggaataaaatggaatggaatggaatggaaaggaatcaacacgagtagaatagaatggaatg

SEQ ID NO: 2886 - DNA, 242 bp, Protomyxzoa rheumatica
agtggagtggagtggaatgaagtggagtggaatggagtggaatggaatggagtggagtggcatggaaatgaatggaatgaaaaggaatggaattgaacggaatgaaacggaatggaatggaacagaatggaattcaatggaacagaacgtagtggagtggagtggagtggatttgactggagtggatgggaatgcagtggaatggaatggaatggaatcgaatggagtggaatggaatggaa

SEQ ID NO: 2887 - DNA, 127 bp, Protomyxzoa rheumatica
agagaatggaatggaatcaactcgagtggaaaggaaaggaatggaaaggaatggaatgtaatggaaaggaaaggaatgcaatggaatgcaatgttatggagtggaatcaaccccagtggaatggaat

SEQ ID NO: 2888 - DNA, 287 bp, Protomyxzoa rheumatica
atggattggaatggaatggaattgatcagaatggattccaatggaatgaaatggaatggaattgaatggaacgcaatggaatcaaatggaatggaatggcatgtaatagaatctaatggaatcgaattgaatggaaaagaattgaatgaaatggaaaggaatggaacagaacggattcgaatggaaaggactggaatggaatctaatggaatggactggaaatgaatggattcgaatggaatggaatcgaatggaatggagtcgaatggaatggaatggaatggact

SEQ ID NO: 2889 - DNA, 131 bp, Protomyxzoa rheumatica
attccaatgcattccattagagcccgttccattagattcccatccattaaattccattctattccattagattcgattcctttcaattccattccagtagagtccattccattccattcgagaccattcca

SEQ ID NO: 2890 - DNA, 202 bp, Protomyxzoa rheumatica
ttccattccagttcattccattcctttccattccattccagttcattccattcctttccattcgattccattccattgcgttggaatcgggttgactccaatccattccattacattccagtcctttccattccattccattccctcgctttttttccattccattgaattccattgcattccattccattccattgcattc

SEQ ID NO: 2891 - DNA, 179 bp, Protomyxzoa rheumatica
ccattcattcccttccattccattccattccactcccattccattccactcgcgttgattctattgcagtccattccattccattctatcccattccgttccattcccctcgggttgatccctttccattccattccattcttttccattccacactggatgataccattgcattccat

SEQ ID NO: 2892 - DNA, 160 bp, Protomyxzoa rheumatica
ggaatggaatggaatcaacctgagtgcaatggaatggagtagaatggaatgtaatggaatggaaacaacccgaaaggaatggaaagtaatggagtgtaagggaattgagtacaatcagtacgaatgtaatggaatggaatggaacggaatggaatggaat

SEQ ID NO: 2893 - DNA, 192 bp, Protomyxzoa rheumatica
aatggaatgaaatagaatggaatggaagggaacggagtggagtgaagtggatttgagtggagtggattggtgtgtagtggaatggaatggaatggaagggaatgaaatggaatagagtggagtggaatggaatggagtggtatggagtggattggagtggaatggagtgtagtggaatggagtggagtggaa

SEQ ID NO: 2894 - DNA, 198 bp, Protomyxzoa rheumatica
ctccactccattccatttcattccattccactccattccattcccttccactccattccattcccttcccttccattccattccattccattgcattccactccactcctttcctctcccttccattacactccactcaattccataccattccattccttaccattccattccttaccattccattccactccactc

SEQ ID NO: 2895 - DNA, 207 bp, Protomyxzoa rheumatica
tccattccatttgattccattccatttgattccaatccattccattccattacactcaattccactctattccaatccactctactccactccattccactctattccaatccaatctactccactccactccattccattcccttccattgtatggcattccactccattccattccattccactcaatgtcattctattccactc

SEQ ID NO: 2896 - DNA, 122 bp, Protomyxzoa rheumatica
ggaatttagaggagtggaatggaatggagtggagtggagtggaatggaataaaatggaatggaacggactggagtggagtggcgtggaatgtaatggagtggagtagagtggagtgaagtgt

SEQ ID NO: 2897 - DNA, 123 bp, Protomyxzoa rheumatica
tttactgtattggagtctaatggaatggactcaaatgtaatgcaaacgaatggactcgaatggaatcaaatggaatcgaatggattcaaagggaatgaaatggaatggaaaggaatggaatgg

SEQ ID NO: 2898 - DNA, 161 bp, Protomyxzoa rheumatica
aattccattccattccatttgagtgcattccattccataccattccatttcactctagttgtttccattccattctattcgtgtccattacattcctttccattctattcaatttcattcgagtccattccattcctttcatttctattccatacaagtat

SEQ ID NO: 2899 - DNA, 157 bp, Protomyxzoa rheumatica
gagatcctgtcgaaagaaaatattggaatggaatggagtgcaatggaatggaatagagtggagtggtttggaaaggaggggaatggaatgggatggaatgaaatggagagaagtagagtggaacggaatggagtggagtggagtggagtggaatgga

SEQ ID NO: 2900 - DNA, 277 bp, Protomyxzoa rheumatica
tttgattccattccattcgagtccattacattggggtgcattccattctgttccattccattccattcgattccattttgttccaatccattctattccagtccattctattcaattgcattccattcggttccattccactctcttccactctgttccattccatttcattccactctattccattccattgcattccattccattccatttggttatattccattcgattccattccactagaatcaattgctttgcaatccattatattcgagt

SEQ ID NO: 2901 - DNA, 145 bp, Protomyxzoa rheumatica
gaatggaatggaaaggaatggaacggaatggacatgaatggcatggagttgaatggaatggaatctaatagaatggaattgaatggaatggaattgaatggaatctaaaggaatagacggaatggagagtaatggaaagatatcg

SEQ ID NO: 2902 - DNA, 200 bp, Protomyxzoa rheumatica
ctcctctccattacattacattacattgctttgcactccaatccacaccactccattgcattccattccactccattccactcctttaagctccaatccattccattcaattccattcccatccactcgacccctatccactccactccactccactccacacaatttcattccagtccattccattccaatccattcca

SEQ ID NO: 2903 - DNA, 144 bp, Protomyxzoa rheumatica
gaatggaatggaatggagtggaatgaaatgtaatggagttgagagaagtggaatggagtggagtagaaaggagtggaatgaaatgggatggaaagaaaaggactggagtggactggactggggtggagtggagtggaatggatt

SEQ ID NO: 2904 - DNA, 202 bp, Protomyxzoa rheumatica
caactccattccaatccattccattcaagtccactccatttcattccattgcattaaactccattccattacactccactccatttcattccactccaatcctttccacccaattgcactccattgcattccactccactccactcaattccactccactcttctccacactattccattccattccactccattttactca

SEQ ID NO: 2905 - DNA, 147 bp, Protomyxzoa rheumatica
cgaatggacaaaaatggaatcatcatcgaatggaatcaaatggaagcatcgaatggaatcgaatggaatcatcatttaatggaatggaatggaatcatcatcgaatagaatcgaatggaatcatcatcgaatggaatctaatggaat

SEQ ID NO: 2906 - DNA, 125 bp, Protomyxzoa rheumatica
agtggaatggaatgaaatgaaatgcagtggagtcgaatgcaatggaatggaatggaatggagaagaatgtaatgtaaaggaatggaatggaatataatggaacggaaaggaatggaatggaatgg

SEQ ID NO: 2907 - DNA, 153 bp, Protomyxzoa rheumatica
ccattgctttcaattccattccgttccactccactccattccactccactcgactccattccattctacaccactccactgcactccatcccattccttccaccccactccgttccactccacttcattccattccattccatcccattccat

SEQ ID NO: 2908 - DNA, 175 bp, Protomyxzoa rheumatica
ggaatggaatggaatggaatggaatgaaatggattggattggaatggaatacaatggaatcaactggaatggaatgaaatgcaatgcaatggaagggaatggaatggaatggaataaatccggttggagtggaatgcaatgtaatggagtggaatggaatggaatttagtggaat

SEQ ID NO: 2909 - DNA, 153 bp, Protomyxzoa rheumatica
ggggaatggagtggaatagaatgggatggactggaatggaatgaagtggagtggagtggagtggagtcgactggagtgcagagaagtggaatggagtggaatggaaagcaatggaatggactcgagtggagtggagtggaatggagtgtagtg

SEQ ID NO: 2910 - DNA, 157 bp, Protomyxzoa rheumatica
atgtagtggaatggaatggattggaatggaatggaatggagtggatttgaatggaatggaatggagaggagtggaggggagtgtaatggaatggagtggaatggaatggagtgttattgagtggaaagagtggagtggaatggaacgtagtggagtg

SEQ ID NO: 2911 - DNA, 130 bp, Protomyxzoa rheumatica
tccgttccattccattcgtgttgattaacatccattccatctcatcccattccattccgttccataccattcctgttgattccattccattcaattctattccattacattacattccactccattccat

SEQ ID NO: 2912 - DNA, 198 bp, Protomyxzoa rheumatica
tccattccattccattccgttccactcgggttgattccataccatcccattccatttgattccattccattcctctcaggttgattccgttccattccattctattccaatccattccattccactccggttgactccataccattccattccattcaattccattcattcctttacattccattccattccagtcag

SEQ ID NO: 2913 - DNA, 86 bp, Protomyxzoa rheumatica
cattccattccattccattctattccactccattccatttggggtgattccattccatttcattccattccattccattccattcc

SEQ ID NO: 2914 - DNA, 149 bp, Protomyxzoa rheumatica
attcttttctattccattccattctattccattccattctattatattccattcctctccattccattccattccattcgcgtccattcctttccactccattcgagtccattgcattccattccattcgagtctattccattccattg

SEQ ID NO: 2915 - DNA, 124 bp, Protomyxzoa rheumatica
ttctgttccattccattgcattccattcgtttcaattccattcgagtccattccacaccagtccattccattcgagtgcattcctttcctgtgcattccattcgagtccattctattacattcc

SEQ ID NO: 2916 - DNA, 134 bp, Protomyxzoa rheumatica
atctcagctcacatttcatttcaccattccattccattcctctccattccattctgttcctttccattcgggttcattcctttccattccattagaatccataccattccactccattccattgcactcaattt

SEQ ID NO: 2917 - DNA, 146 bp, Protomyxzoa rheumatica
attccattcaattcaattccattcgattccattccaatcagttcctttccatttgactccattccattggagtccattcaattccattccattccattccattctgttctgttcgattccaatctgtttgattccattttgttcca

SEQ ID NO: 2918 - DNA, 162 bp, Protomyxzoa rheumatica
caactccattccattccattgcactccattccattccattgcattccactttattccactccattccattccgctcgactccactccactccattccattccattccatttcattctactcgattacactccactccattccactcaattccttgccattcc

SEQ ID NO: 2919 - DNA, 176 bp, Protomyxzoa rheumatica
tcactgctctccattccattccactccactccactccactccatttcattgcattccattcctttcctttcaattccactgcattccattccattcaattacactccacaccattccattccattccattctcctccattctattccactccactccattccattccattccattc

SEQ ID NO: 2920 - DNA, 159 bp, Protomyxzoa rheumatica
cattccattccattctattccattccactccactccactcaactccactccagtccactacattccatcaattccactccactccactccattccatcccattccatttcactccattccactccactcctctccattccactccattccattcaactc

SEQ ID NO: 2921 - DNA, 272 bp, Protomyxzoa rheumatica
gagtggaatgtaatggaatagaatggagtggaatcaacccgagtggaatggaatggtatggagtgaaatggaatggaatggaatggtacggaatgtaatggaatggaatggaaaggaaaggaatgcaatggaatcaaaacgagtggaatggaatggaatggaaaggaatggagtggaattcaatagaatcaaccctagtggagtggaatgaaaaggaattgaatggaatggaaaggaatgggatggaattcaatccagtgtaaaggaatgga

SEQ ID NO: 2922 - DNA, 133 bp, Protomyxzoa rheumatica
agtttccttttgtgagagcagtattttaatagtctttttgtagaatctgtcagaggatatgtggagcgatttgaggcctatggtacaaaaaacgagacagaagaattctcaggaccttctttgaggtgagtgc

SEQ ID NO: 2923 - DNA, 143 bp, Protomyxzoa rheumatica
actctactccactcctttcctctccactaaactctattccattccaatccattccattcgtttcaattccacttcacttcactccattcaattccactccctccactcctctccattccactccattccattgtattccattc

SEQ ID NO: 2924 - DNA, 169 bp, Protomyxzoa rheumatica
tacattccaatccattccattccactctattccaatccaatacactccattccattccactctattctattctatttcactccactccactccattctacagcactccactccactccactcctttccactccactacactctattcctttccactccaatctattcca

SEQ ID NO: 2925 - DNA, 129 bp, Protomyxzoa rheumatica
tccaatcgggttgattccattccattcatttccattccattccataccattctattcgattccattccattccactcgggttgattcagttccattccattccattccacgcgagttgattccattcca

SEQ ID NO: 2926 - DNA, 179 bp, Protomyxzoa rheumatica
atggaatggaatggaatggaatggaatggaatgaactcgaatggaatgcagtggaatgcattcgaatggaatggattggaattgaatggactcgagtcgaacggaatgtaatagtatggaatggactcgaatggaatgcaatggaatggaatggaatggaaaagaaaggaatgtaatgg

SEQ ID NO: 2927 - DNA, 149 bp, Protomyxzoa rheumatica
tccattccaatccacaccactccactacattccactccaatccattccactccatttctctcttctgcattccattccattccattcgtttccattctattcctttccattccactccaatccaatctattccactccattccactcca

SEQ ID NO: 2928 - DNA, 123 bp, Protomyxzoa rheumatica
cgaatgctatgcaatggaatggaatgggctcaaatggaatggaatgaaatggaagagtatggaaaggaatagaatggaatggaatggatttgaatggaaaggactcgaatggaatggaatgga

SEQ ID NO: 2929 - DNA, 81 bp, Protomyxzoa rheumatica
tggaaacgaatggaatggaatggggtggaatggggtagtgtggaaaggaatggagcagaatttaatggaatggaatgcaat

SEQ ID NO: 2930 - DNA, 206 bp, Protomyxzoa rheumatica
gagtccattccattccattatattccattccagtccattccattgcatttcagtcctatccattccattccattccattcgagtccattccattgcattccattccattcgagtccatttcattccattcgagtcctttcaattctattccattcgagtccattttatccattccattcgtgtccaatgcaatgcattgcattccg

SEQ ID NO: 2931 - DNA, 228 bp, Protomyxzoa rheumatica
ccactaaactccactccattccattccattccacttcactctgatccatcccactcaactccactccactccactctactccactccattccattccactccattcaattccactgcattccaatccactccactgcactccactcccttccattccattccaatccataccattcctctgcactcctctccattccactccactccattccattccactccactcca

SEQ ID NO: 2932 - DNA, 149 bp, Protomyxzoa rheumatica
cattctatttcattccactccattaaactcgggttgattcaattacattccattccctcccattccattccattcctttccaatcgtgttcattccatgccattgcattccattgcattccattccgttaaattccattccattccatt

SEQ ID NO: 2933 - DNA, 139 bp, Protomyxzoa rheumatica
ccattccattccattgtactcgggttgaatccattccatttcattccattccgtttcattccattccattctacagtagttgattccattccattccattccattcgggtagcttcaatttcatttcattcccttccat

SEQ ID NO: 2934 - DNA, 129 bp, Protomyxzoa rheumatica
aaaggaatggaatggaatggaatggaaaggaatggaatgttgtggagtggaacggaatggagtggagtggaatggaatgcactggagtggattggattggaatggaatggagtggaaaggaatggaatg

SEQ ID NO: 2935 - DNA, 176 bp, Protomyxzoa rheumatica
ggtttattccatgccagtccattacactacattcccttccattccaatccattcctttcttatccattgcattccattctattctcttctattccatacaatttcattccattcgtgcccattccattcaattccattcctttcaattccattccatctgtttccattctcgtcga

SEQ ID NO: 2936 - DNA, 155 bp, Protomyxzoa rheumatica
gtggaatggagtggaatgtaatggtatggaatgacatggagtggagtggcgtggagttgaatggagtggactggagtggagtggaatgtaatgtaatggagtggaatggatatagtggagtggaatggaatggaatgaaatggaatggaatggaa

SEQ ID NO: 2937 - DNA, 184 bp, Protomyxzoa rheumatica
attccgttccattccattcgtgttgattccattccattcctttccattacatcacattccattccactgcattccattcctctcatgttgattccaccccattccattccattcatttctttccattccattccattccgttcaattccactcgggttgatttcattccattccattccattcc

SEQ ID NO: 2938 - DNA, 169 bp, Protomyxzoa rheumatica
attccattccattccattccattccattgctttccattagagaccattccattccagtccgtttcatttgagtccatctcattccagtccattccatttgattccattcctttggattccattccattgtattccattccattggattccattccattctatttcattc

SEQ ID NO: 2939 - DNA, 124 bp, Protomyxzoa rheumatica
cagagtgagatcctgtcgaaagaaagtaatggaaacagatggagtggaatggaatgcaatggagtggattggagtggatttgagtggagtggagtgaactggagtggagtggagtggaatggag

SEQ ID NO: 2940 - DNA, 166 bp, Protomyxzoa rheumatica
gagtggaatggaaaggaaaggaatggaatggaagagaatgcaatggactggaatggagtggaatggaatggaatggaatgtcatcaaatggaatggaatggagtggaatgaaatggaaatgtgtggagtggagtggaatgaaaaggagtggattggtatggagttg

SEQ ID NO: 2941 - DNA, 136 bp, Protomyxzoa rheumatica
ggaaatcaatgaaatggaatgcaacacagtggaatgaagtggagtggagtgcagtggagttgagtggagtggataggaatgcagtgcaatggaatggaatggaatgtaagggagtggagtggagtggattggagtg

SEQ ID NO: 2942 - DNA, 199 bp, Protomyxzoa rheumatica
gacacaatctcgggtcacatttcatttcacgattccattccattccattccattctattccactccactccactcttctccactccactccaatccattccactccactccactccattccagtccactccactacactccattccatccctcgccattccactcatttccactccactccactccattccattccatt

SEQ ID NO: 2943 - DNA, 200 bp, Protomyxzoa rheumatica
tggagtggagtggactggagtgtactggagtggaatggagtggaatggtatgcagtggagtggaaaggaatggaatggaacggaatgcaatgcaatggaacggactggaatggaatggaacagaatggagttgagttgagtggagtggagttgagaggattggagtggagtggagtggaatggaatggaacggaatggaa

SEQ ID NO: 2944 - DNA, 156 bp, Protomyxzoa rheumatica
gattggaatggagtggagtggaatagattggaatggagtggagtggaggggaatggaatgtaatggaaaggaatggagtggagtaaagtcgagtggagtggagtggaatggaatgaaatgcaatggaattgaatggactggaatggaatggattcg

SEQ ID NO: 2945 - DNA, 143 bp, Protomyxzoa rheumatica
attgcactctactccgctccacaccgctccattcaattttactctttcccattccattccactccactccactccaatccactccattcaactccattcctctccactccactccactcccctaaaatccattccactccatt

SEQ ID NO: 2946 - DNA, 268 bp, Protomyxzoa rheumatica
tccattccactccactccactctactccactcgactccattccactccagtcgtatccaatccagtccaatcaaatccattccactccactccagtcaaatccattctactctactgcattccgttccactcctttccacactattacacgccgctccaatccattcctctcaactccattccattccactccatcccattacatttcactccattccattccattccactccatcccatttcatttcactccattccattccattcc

SEQ ID NO: 2947 - DNA, 149 bp, Protomyxzoa rheumatica
gagtggaatcatcatagaatttaatcaaatggaatcatcgaatggaatcatcatcgaatggaatcctcgaatggaagcgaatggaatcatcatcgaatggaatcgaatggaaccatcaaatgaaatagaatggaatcatcatcgaaggg

SEQ ID NO: 2948 - DNA, 220 bp, Protomyxzoa rheumatica
tggaatggaatggaatggaataaacccgagtagaatgcaatggaagggaatggaatcgaatgtaatggaatggcattgaatggaatcaacacgagtggaatggaatggaatggaatggattggagtggaatggaatcaaccccagtggaatgtaatgtacaggaatggaatggaatggagtagaatgaacccgagtggaatggaatggtatggaatgaaa

SEQ ID NO: 2949 - DNA, 183 bp, Protomyxzoa rheumatica
ttccattgcattccaatccattccatggaattccattccaatccattccattgcattccattccatggaactccattccactccattccattgcattccattccatggaactccattccatggaactccattccactccattgcattgcattccattccatggaattccattccactccattc

SEQ ID NO: 2950 - DNA, 96 bp, Protomyxzoa rheumatica
aaatccgggtggagtggaatggaatgtaatggagtggaatttagtggaatggaaacgaatggaatggaatggaacggaatggaatggaatggaatg

SEQ ID NO: 2951 - DNA, 171 bp, Protomyxzoa rheumatica
ccattccacttcattccattcctttccattccattccattccattccactccggttgattccactgcatcccattgcattgcattccatttcattcctctcacgttgattccattcctttccattccatatcactcgtgttgattccattccgttcctttccatttcattc

SEQ ID NO: 2952 - DNA, 169 bp, Protomyxzoa rheumatica
agttgaatggactcaaatggaatgaaatggaattgacatgaatggaattgaatggaatggaaaggaatggaattaagtgtaatggaatggacacaaatgaaatggaaaaaaatggactcgaatggactcgaatggaatggaatggaatggaatcaaatcgattgcaatg

SEQ ID NO: 2953 - DNA, 174 bp, Protomyxzoa rheumatica
caaatggcatcaattggaattgaatggaatctggtgaagtggagtggagtagagtggaaaggcgtggtattcaatggggtggaatggaagtgaatggagtggtgtggagtagaatggaatggagtggaatggagtggaatggaatggaatggaatggaatggagtggagtggaa

SEQ ID NO: 2954 - DNA, 136 bp, Protomyxzoa rheumatica
agtggaatgcaatggagtggaaaggtacggaatggaatgtagtggaatggaatgaaatggaatggaatggagtgtaatcgtatggaatagaatggaatggactggtttggagttgaatggaatggaatggaatgga

SEQ ID NO: 2955 - DNA, 128 bp, Protomyxzoa rheumatica
agtggagttgagtggagtcgattggagtgagttggagtggagtggagtgctatggagttgtatggaattgagtggtgtggaatggaatggaattgtacggattggaatggaatggaatggaatggaat

SEQ ID NO: 2956 - DNA, 164 bp, Protomyxzoa rheumatica
gagtggaatggactcgaatgcaatggaaacaaatggaatggaatgctacggaatggaatggaaaggaatagaatggcatggaatcaaatggaatggaatggaaggctatggagtcgaatggaataaaatcgaatggaatagcatcgattggaatggaatggaat

SEQ ID NO: 2957 - DNA, 182 bp, Protomyxzoa rheumatica
gtaatggagtggagtggagtgaagtggaacggagtggagtgcagaggagtggaatcaaggggaatggaatggactcgaatcgaattaactggaatggaatggactgcaatggaatggtctccaatggattggacatgaatggaatggactcgaatggaatgaatggaatggactcgaatggg

SEQ ID NO: 2958 - DNA, 129 bp, Protomyxzoa rheumatica
cattccattctcttccgttccattccattccattccattcgtgtccatttcattccattcgaatccattccactccattccattgcactcatgttgattccattctattccattccattcgagtccatt

SEQ ID NO: 2959 - DNA, 146 bp, Protomyxzoa rheumatica
cactccgatccactccactcaactccactccactccattccattctactccattgcattccacctcactccaatccactccattccactcctctccactccactccatgcccttccattccattccaatccattctataccactcc

SEQ ID NO: 2960 - DNA, 140 bp, Protomyxzoa rheumatica
aaaggtgtagaatggaatggaatggaaaagagaggaatggagtggagtggaatggagtagactgtagtggagtggaattgagtggaatggaatagaacgaaatggaagggaatgtaatggaatggaatggaatggaatgg

SEQ ID NO: 2961 - DNA, 173 bp, Protomyxzoa rheumatica
ggaatagaatggaatggagtgtaatggaaagatatcaaatggaatggaaaggaaatgattggactcgaatggaatggactggaatggaatagaatctaatggaatgtactggagtggaatggactcgaatggaatggactggagtgtattggactagaatggaatggaaacga

SEQ ID NO: 2962 - DNA, 121 bp, Protomyxzoa rheumatica
actacatacgactccattacattcgattccattgctttccgttgcattcaattcctttccattcctttccattccaatacgttcgattccattatgttccagtccattccattcggttcca

SEQ ID NO: 2963 - DNA, 125 bp, Protomyxzoa rheumatica
attctattccattccattccattccaatccatcccattccattccattcctttccattccattcattcccattacactcgggttgattccattgtattgcattccattccattccattccattcc

SEQ ID NO: 2964 - DNA, 171 bp, Protomyxzoa rheumatica
cactcgattccattccactccactccattccattccactacattccattccattccactctactccatttcattccatcccattcaactccattccattccacaaaactccagtagaatggaatggaatggggtaaaatggaatggagtggactacagtagaatggaatgg

SEQ ID NO: 2965 - DNA, 137 bp, Protomyxzoa rheumatica
aagtgaatcaaatagaatggaatggaatagaatggaatggaaaggacttgaatggaatgcgttggagtggaatggactcaaacggaatggaaacaaatggaatagaatggaaaggaacggaaaggaatagaatggaa

SEQ ID NO: 2966 - DNA, 131 bp, Protomyxzoa rheumatica
caaagggaatggaatcgattggaatgcaattgaatggaatggaatcaaaaagaatggaatcgaatggaatgaaatcgaaaggaatagaatcgaaaggagaggaaacgaatggcatctaatggaattgaatg

SEQ ID NO: 2967 - DNA, 161 bp, Protomyxzoa rheumatica
tccattccattccattccagttgattccattggcttccattccgatgcaatccatttcatttccttccattccattccattccattccactaaattccattatattccactcgattacattccattccactccacccggatttattccattccattccatt

SEQ ID NO: 2968 - DNA, 124 bp, Protomyxzoa rheumatica
tggaacaaaatggattcgaaaggaatggaatagaaaggactcgagtggaatggacttgaatgtaatggaattgaattgaagggagtgcagagaaatggacttgaatgcaatggaaaaaattgaa

SEQ ID NO: 2969 - DNA, 159 bp, Protomyxzoa rheumatica
gaaatggaatgaattggaatggaatggaatggaatgtagtgaggtggagtggaacggaattgagtgtaagggaatagaatggaatggaatggaatggagtggagagagtgcagaggggtagagtggaatggaatggaatggagagaagtggaatggaaa

SEQ ID NO: 2970 - DNA, 165 bp, Protomyxzoa rheumatica
gagtggaatggagtgaaatggagtagaatggagtggagtggagaggagtgaaatggagtgaaatggagtggaatttagtggagtggagtggaatgatgtggaatggagtgaaatggagtggagtggagtggcgtggagtggaatggagtggaatggaatggaaca

SEQ ID NO: 2971 - DNA, 130 bp, Protomyxzoa rheumatica
tggagtggaatggagaggaatggaatggaatggaattcaatggaacggaagggaatggagtggagtggagagcagtggagtggagttgagtggagtggatcgcagtacagtggaatggagtggaattgaa

SEQ ID NO: 2972 - DNA, 158 bp, Protomyxzoa rheumatica
ccactccatttcactgctttctatttgattccattccattcatttccattccattcatttccattccattgcattcaactccatttgattccatttcattcgatgccattccatttgattccattccattccatttgtttccattccgttgcattcta

SEQ ID NO: 2973 - DNA, 153 bp, Protomyxzoa rheumatica
tggagtggagtggagtggaatggaacggaatggagggaaattgaatggaatggaatgaatgaaatggaatggaatggagtggagtggagaggagtggggtggaaaggaatgggattgagtggagtggagttgagtagaatggaatgaaatgga

SEQ ID NO: 2974 - DNA, 147 bp, Protomyxzoa rheumatica
gaatggaatggaatcgaatggaatggaaagaattggtctcgaatggaatgcaattgtaatgtatggactcgaaagaaatggaatggaatggaatggaatgcagtcgagtggaatggaatggaatggaatggaattgactggaatgga

SEQ ID NO: 2975 - DNA, 144 bp, Protomyxzoa rheumatica
cattctattccactccactctattccactacattctattccactccactccattccactacattccattccattcgcttcattccattcaactccactccattctattccaatccattccaatagactacactccattctactc

SEQ ID NO: 2976 - DNA, 349 bp, Protomyxzoa rheumatica
ttcattccattgcattccattccaccccactccattccactccattgcattccactctactacattccataccatttcattccactccattacattacattccactccattccattccactgcactccactccattccattccattgtattccattcaaatccactccactaaattattttccattccattccactccattccattctactccaccccactccactcaattccattccattccactccttctattccattccactgcattccactccactccattccattccaccccactccactccactccattccattccactccattcaattccattgctcttcct

SEQ ID NO: 2977 - DNA, 188 bp, Protomyxzoa rheumatica
ctttgattccattatttttcagtccattccattcgagtgcattccattccaatccattccattcgattccattcctttcaaatccatgccattcgattccattccactcgattccactccgttccattccattgcattccattctattccattccattgcataccgttcgattccatttgattacatt

SEQ ID NO: 2978 - DNA, 130 bp, Protomyxzoa rheumatica
tggagtgtaatggacttgaatggaatggaatttattcgaattgaatataatgtaatggaatagaatggactcgaatgtaatgtaatgtaatgaaatggacttgaactgaatggaatggaatggacttgaa

SEQ ID NO: 2979 - DNA, 122 bp, Protomyxzoa rheumatica
agtagaatggaatggaatggagtggaatggaatggagtggaattgaatggaatagaatggaatcaaactgagtggaatggaaatgaaagaaattgaaaggaatggaatggaatggaatggaa

SEQ ID NO: 2980 - DNA, 166 bp, Protomyxzoa rheumatica
cgagtccattccattccattctattctcttccatttcattcccttcaagtccgttccattccattccattccattcaaatccattccaatccattccattgtattccattcgaatccattccattccattccatagcattccatttcattactttctagtccattc

SEQ ID NO: 2981 - DNA, 178 bp, Protomyxzoa rheumatica
aagcaacggaattgattggcgtggtgtggaatggagtggggtcgaataaaatgaaattgaaaagaatgggatggaatggaatggaaaggaaaggaatgctgtggagtggaatcgaatggagtggaatgacatggagttgaatggaatggaatggaatggaatagagtggaatggaatg

SEQ ID NO: 2982 - DNA, 296 bp, Protomyxzoa rheumatica
cattccattcgagtccattccattccattccattccattcaacgccattccattagattctactccattcaaatccattcctttccattccattccatctgattccattccattctattccgttccattccattcctttccattccatgccattcgtttccattccattcgaatccattccactccagccaattccattcaagtccattccactccagtccattccattcgagtccattccagtcaattcaattcaatttcattccattcgataaatttccattgcactccattcc

SEQ ID NO: 2983 - DNA, 150 bp, Protomyxzoa rheumatica
tggaataaacaccaggggaatgaaatggattggaatgaaaagaatggaaagggaatggaatggaataaaatcaaccagagtggaatggaacggaacggaatgaaatggaaaggaatgaatggaagggaatggtgtggagtcaacacgaga

SEQ ID NO: 2984 - DNA, 126 bp, Protomyxzoa rheumatica
tgcattccactcctttccactccactccactgcattccattccattaaattgcattccactccactcccatccactcaactcaactccactcctttcaattccattccttcccattccattccatt

SEQ ID NO: 2985 - DNA, 137 bp, Protomyxzoa rheumatica
cattccagtccattccattcgattccgttccattcctttccatttgaattgatgccattccctttgattctattccattctactccattccattccattccaatctttccgattccattccattccattccatttca

SEQ ID NO: 2986 - DNA, 250 bp, Protomyxzoa rheumatica
tcattccattacatttgcgtccattccatctcattccattccattccattccattccattcgtgtctaatccactccattgcattccattctagtccattccactgcattccatatcatacgcgtcctttccattccattccacttgagtcgattccattctattccattccattccactccatttcattctagtcctttccattccattgcgttcgtgtcttttccatttcattccattccgttccttt

SEQ ID NO: 2987 - DNA, 173 bp, Protomyxzoa rheumatica
gaatggaaaggaattaacccgaatagaatggaatggaatggaatggaacagaatggaagggaatggaatggaatgtaatcaacccgagttcaggggaatggaatggaatggaatgcaatggaggggagtcttccggaatggattggaatggaatggaatggaatggaatggaa

SEQ ID NO: 2988 - DNA, 176 bp, Protomyxzoa rheumatica
tccattccatttgagtgcattccattcaattccattccattcgagtccattccattttattccattatattccattccattccattcctttacattcttgtccattccattccatgccattctactccccttcattctattacattacattcctttggagtctattcaattccatt

SEQ ID NO: 2989 - DNA, 231 bp, Protomyxzoa rheumatica
ccattccactccattccactccaatccacttcactccactacactccattccacttcactccactccactccactccacaccactcctttccgttccgttccattccattctgttcccttccattgctttctgttccattccattccattccactccactgcattccattccactccgctctactccactctacttcactccactccattccatttcattccagttcattc

SEQ ID NO: 2990 - DNA, 153 bp, Protomyxzoa rheumatica
atggaatggaatttaatggaatggaatggaatggaatggactcaatgtgagaggaatggaatggaatggatgggattggactggaatgaaatggaatagaatggaacggaatgcaatggattgcattgaaatggaatggaaaggagtaaaatc

SEQ ID NO: 2991 - DNA, 191 bp, Protomyxzoa rheumatica
actccatgccactccattccactccactccactccattccgttccactctattccactccactccactcaatgccactcccctccactccactccattccactccactcctctccactccactccactcccctccactgcattacattctactccactccactcccctccactgcattacattccactcca

SEQ ID NO: 2992 - DNA, 131 bp, Protomyxzoa rheumatica
tccattccatagcattcaattccacttcacgtcactgcactcctctccactccattgcactccattccattgcattctaatccactccactccactctgttcaattccattccttgtctttccattccatt

SEQ ID NO: 2993 - DNA, 173 bp, Protomyxzoa rheumatica
agtactcaaaatatatattgtatactgtacaaaaaaaatcaaagtacccaaaatgtatattatatactgtacatcaaatatgaaagtaaccaaagtatatattacatactgtacatcaaaaatcaaggtacatatactatatattatatactgtacataaaatatcaaagtac

SEQ ID NO: 2994 - DNA, 125 bp, Protomyxzoa rheumatica
tcattccattccattccattccatttctttccaatccatttcattccccttgtgtttattcaattccactccattccgtcccattccactccattccattccattccgttccattccattccatt

SEQ ID NO: 2995 - DNA, 156 bp, Protomyxzoa rheumatica
aatggcaagaacccgaggggaatgtaatggaatatactggaatggaattcaatggagtggaatcaactggattagaatgaaaggaatgtaatggaatggaatcgagtgaacctgagtggaatggaatggaatggaaactacccaaatggaatggaa

SEQ ID NO: 2996 - DNA, 173 bp, Protomyxzoa rheumatica
tccattacattcggattgattctattgaattcccttacactccattacataccattccattcgggatgtttccattccattccattccattccactccattcaattgcatcaggttgattgcattccattaaattccattccattccggatgattccattccattgcattcca

SEQ ID NO: 2997 - DNA, 176 bp, Protomyxzoa rheumatica
attccattccattcgggtccattccattccattccattcctttcaagtccattccaatgcattctattccattttagtcgattcgattcgattccattccattcgagtccattcctttccatttgtgtacattccattccattctatttgagtccattccattcaagtccattcca

SEQ ID NO: 2998 - DNA, 184 bp, Protomyxzoa rheumatica
gaagtggagtggagtggaatgatgtggaatggaatggaatggtgtggagtggaatggagttggatggaatggagtggactgtagtggaatggagtggaattgaatgtaatggaatggagtggagtggagtgcagtggagaggggtggaggggaatggaatggaatggaatggaatgcaatggaa

SEQ ID NO: 2999 - DNA, 158 bp, Protomyxzoa rheumatica
attctataccattccattccactttaccccggtcaactccagtcaactccactccaccccactccattcctttccagtccgttccattcctttccactctactccatttcactccactccattccactcaacaccattccactccactccattccatt

SEQ ID NO: 3000 - DNA, 148 bp, Protomyxzoa rheumatica
ccattcccttctattcctttccattccattccattctattctataccattcgattccattgcactcgagtccgttccgctccattccattcctttcgagttcattccattccagtccattccgtttgtgtccattccattcaattcca

SEQ ID NO: 3001 - DNA, 144 bp, Protomyxzoa rheumatica
gtggaatggaattgaatggaatggaatggaatgcaaaggattgcaatcaaaccgagtggaacagagtagaatggaatggaagggaatggaatggaataaactggagtggaatggattggaatggaatggagtggagtggaatgg

SEQ ID NO: 3002 - DNA, 160 bp, Protomyxzoa rheumatica
cactccacttcattctgttaccttccattctattctgttccattccattccattctgttcctttccattccattccactctactccattccattcccctccgttccactccagtccactgcattccactccactccactccactccactccactccattc

SEQ ID NO: 3003 - DNA, 144 bp, Protomyxzoa rheumatica
caagtccattcctttccattcctttactttccattccattaaactccattcacttccattctgttccgttccattccattccactccacgtcattctgttgcattcctttccattccattccattccactccactcaacttcac

SEQ ID NO: 3004 - DNA, 150 bp, Protomyxzoa rheumatica
ccattgcattccattggattccattcaattgcattccattccattcctttcaagtccattgaattccattcgagtccattctatcacattccattcgagtccattccattgcattccattcaattcgagtctattccattctattccatt

SEQ ID NO: 3005 - DNA, 147 bp, Protomyxzoa rheumatica
attccattccattctattccattccattcccttcctttcccttccattccattccattccattccattcgattcgggtccattccatcccattcaattcgattccatttcattaaattccgttccattccattccattcaattccac

SEQ ID NO: 3006 - DNA, 168 bp, Protomyxzoa rheumatica
ttgagtcccgttgagtcaagtggaatggagtggaatggagtgaaatggagtagagtggaatggagtgcagtggaatggaaaggattaaaatggaatggaatggaacggagtgtacagtagtggagtgtagtggagttgagtggagtggatcagagtgcagtggaatgg

SEQ ID NO: 3007 - DNA, 124 bp, Protomyxzoa rheumatica
attccagtggactggagtggatttgattttaatggaatggaatagactggattggagtggtgtagagtgcagtggattggagtggagaggaatggagtggagtgaagtcgagttgagtggaatg

SEQ ID NO: 3008 - DNA, 136 bp, Protomyxzoa rheumatica
ttccattccattccattccattccattccattccactcttatccactccacgccactccactccactccactccattctgttccgttgcattccattcctttcctttcccttccatttcactacactccattccat

SEQ ID NO: 3009 - DNA, 194 bp, Protomyxzoa rheumatica
ggaatggaatccaatggaatcacctggaatggaatggaatggaatggaatggaatggactcgaatgcaatggaatggaatggaatgcgctcaaatggaatggaatggaatgtaagggactcaaaaggaatggaaaggaatggaatttactcgaatggaaggaaaggaaccgaatagaatggagtacaatggaat

SEQ ID NO: 3010 - DNA, 139 bp, Protomyxzoa rheumatica
cattcgattacattcaatttattccattccatttgattcgattgcattccattccattccaatggattccattcctttccaaacttttccattctattccaatccatttgattccattccatctgattccagtcctttc

SEQ ID NO: 3011 - DNA, 155 bp, Protomyxzoa rheumatica
gaatggaatggaatggaaaggaatggagtcaagtggtgtagaatggagtggagtggagtggagtggagttgagtacagtggaatggagtggagtggaattgagtggagtggaattgaatggaatggaatggagtggagtggaatggaattcaatg

SEQ ID NO: 3012 - DNA, 151 bp, Protomyxzoa rheumatica
ccactccattccactccactccattccattccattccacttcaggcctttccattccactacactacattccattccaatccactccattcctttcctctaatccccattccattccattccactccactccatccactcctctccaatcc

SEQ ID NO: 3013 - DNA, 122 bp, Protomyxzoa rheumatica
actccactcaactccactgcattccagtccactccactcacttccgttctgtttctttccattccgttacattccattccattccgttctatttcattccaatcctctccattccattacag

SEQ ID NO: 3014 - DNA, 230 bp, Protomyxzoa rheumatica
ggaatgggatgtaatggaatggaatggaatggagtgaagtggcatggagtggaatgcagtggagtggattggaatggagtggaatggaatgggatggattgtgtggaatagagtggaatggaatgtagtggagtggagtggaatgaagtggagtggagtttattggagttgagtggagtggagtggaatgaaatggaatggaatgtagtggagttgaatggagtagagtg

SEQ ID NO: 3015 - DNA, 190 bp, Protomyxzoa rheumatica
tcattccagtccattcctttccagtctattccattcaagtccattccattccattcctttactttccattccattaaactccattcaattccattctgttccattccattccattccactccatgtcactttgttctgttcctttccattccattctcttacactccattccactccactcaacttcact

SEQ ID NO: 3016 - DNA, 150 bp, Protomyxzoa rheumatica
gacccaaatgtaatagacacaagtgaaatgcactcaaattcaatggacttgaaaggaatcgtctcgaatggaatttattcgaatagaatggaatccaatggaatacaatggtatggaatggaatcaaatggaatggaatcgaatggaatg

SEQ ID NO: 3017 - DNA, 144 bp, Protomyxzoa rheumatica
tgcatttgatttcattcctttcgtgtccatttcatttgattctattacattcgatgccattccattccagtccattccatcgagtccattccattaaattccattctttccattccattccattccagtccattccattcccat

SEQ ID NO: 3018 - DNA, 132 bp, Protomyxzoa rheumatica
cactacaatccacaccactccattccagttccctccattccattcaattcaattaaattccattccattaacctccattccattccattcctttccaatactctccattccattccactctactctgctcca

SEQ ID NO: 3019 - DNA, 155 bp, Protomyxzoa rheumatica
agaatggaatcaaaccgagtggagtggaatggaattaaatgtaatggattggaataaattagaatggaatggaattaattagaatggaaaggaatggaatggaatggagtggaatcaaccagagtggaatggaattgaatggaatggaatggaat

SEQ ID NO: 3020 - DNA, 123 bp, Protomyxzoa rheumatica
ttccattccaatccattcgatgccatttaattccattctattccattcgactccgttccataccattccattccatccgatttcattccattctattcctttccattccattccattccattt

SEQ ID NO: 3021 - DNA, 128 bp, Protomyxzoa rheumatica
tggagtggaatgtaattaaatggaatggaattgaatttaatggaatttaatcaaaacgagtggaatggaatggattggagtggaatcaaccaaagtggaatggaatggagaggaatggaatgcaatgg

SEQ ID NO: 3022 - DNA, 148 bp, Protomyxzoa rheumatica
aatggactagaaaggaatggagtggaatggactcgaatcgaatggaatggactcgaatggaatggaatggaccgtaatggaatggaatggatttgagtggaatggaattgagtggaatggaatttaatggaatggagaggaatggaat

SEQ ID NO: 3023 - DNA, 140 bp, Protomyxzoa rheumatica
cattccttttcattccactccattacattccctgctattccactcgaaatgattccattccattcaattccattccattcggttccaatccagtccattccaatccattccaatcgagttgtttccattccattccattc

SEQ ID NO: 3024 - DNA, 135 bp, Protomyxzoa rheumatica
ttcaatgattccatttgattctattggatgatcccttccgattccattcaatgattccattcgattctattcgatgatcattccattcggttccatttgatgattccattcgattccattcattgatgattccat

SEQ ID NO: 3025 - DNA, 131 bp, Protomyxzoa rheumatica
ggaatgaaaaggaatggaactgaatggaatggaatggaatggaatcaacccaagtggtatggaatggattggaatggaatgttatggaattgaatggagaggaatcaaaacgagaagaatggaatggaatg

SEQ ID NO: 3026 - DNA, 145 bp, Protomyxzoa rheumatica
aatggagtggagtggaatggaatggagtggagtggaactgaatagaatggagtggaacagagtcgaatggaattgagtggaatggaacggaatggagtggaatggaatggaatgaaattgaagggaatggaatggaatgcggtgg

SEQ ID NO: 3027 - DNA, 123 bp, Protomyxzoa rheumatica
ttccgttccattccattccgttccattcctgttaattccattgcttccattccgttccattgcattccattccattccgttccactcagggtgattcctttctattccagtccattttcttcc

SEQ ID NO: 3028 - DNA, 120 bp, Protomyxzoa rheumatica
attccattccattccattccatttcattccattccattccctttcattccattccattcctttccattccattccattggtatcgagttgattccattccattccattccattccattcc

SEQ ID NO: 3029 - DNA, 127 bp, Protomyxzoa rheumatica
atatacatatatacatatatgtgtgtatatacatatatacatatatgtgtatatacatatacacatatatgtgtgtatatacgtatatacatatacacatacatatatacatatatacatgttatgt

SEQ ID NO: 3030 - DNA, 548 bp, Protomyxzoa rheumatica
attccattccattccattccattccattcctttccatttgattcaattccattctattccattctttttcattccattcctttccattccattccaatccagttcattccattccagttcattccattccgttccattccaatccattccagtttattccattccattccattcccttccattcgattccattccattccattgcataccattccattccactcagattgattgaattccaatctatttcattccattccattccattcctctcgggttgattccattccattccattccttacaattcaaatccattccgttccatttgattcaattccattctattccatttcactcgattccattccattccattccaatccattccattcctttccactctgttggattccattccattccttgccattcgcttccattccatcccattccactctgcatgattccattctattccattccattccattcagttccactccattcgattccactcgtgttgattccattccattccattccatt

SEQ ID NO: 3031 - DNA, 136 bp, Protomyxzoa rheumatica
tccattccattgtcatccattccattctatcccactgcattccattccattccaatccactcaactccactccactccaccccattccactccattccattccagtcaattccattgcattccaatccactccatt

SEQ ID NO: 3032 - DNA, 148 bp, Protomyxzoa rheumatica
gagtggaatggaatggaatgaagtggaatggaatggaatggattggagtggaaaggaggggagtggagtggaatggattggagtagagtggaatggagtggaatgaaatggacttgaacggaaagggctcgaatggaatggactcgaa

SEQ ID NO: 3033 - DNA, 147 bp, Protomyxzoa rheumatica
tggagtggagtggaatggaatggtatggattgttatggaatggaattcaatggggtggaatggagtgctgtggggtgtagtggagtggaatgaagtggaatggaatgggatggaatggaatggagaggagtggagtggaatggagtg

SEQ ID NO: 3034 - DNA, 147 bp, Protomyxzoa rheumatica
ccattccactctgctccactccattcgactccactccattccactccactccattccactccaatctattgcattccactccaatccactccattccactccactccattccattccaatccactaaactgcatttcactccactcc

SEQ ID NO: 3035 - DNA, 147 bp, Protomyxzoa rheumatica
gaattaaatggagtagaaaggaacagaacggaatggaactgaatggaatggaatggaacgcagtggaatggagtggagtgcagtggagttgagtagagtggattgcaatgcagtggaatggaatggaatggaatggagtggagtgca

SEQ ID NO: 3036 - DNA, 146 bp, Protomyxzoa rheumatica
agtggaatggcatggaatggaatggaatggaatggtacggattagaatggaatggagcgaaatggaatggaacgaaatggaatagaatggaatggaatggaatgggatggaatggaatcattccgagtggaatagaagggaatgta

SEQ ID NO: 3037 - DNA, 190 bp, Protomyxzoa rheumatica
cagtccatttcattcgagtccatttcaatccaatcgatatcattccatttcactccattccattccatttcattcgattccattcaattccattctatttgattccattccattcagttccgttccattctactacattccattttagtacattccattccattccattccattcctttccattccattc

SEQ ID NO: 3038 - DNA, 158 bp, Protomyxzoa rheumatica
ttccgttcgagtccattccattagattccattccattccattccattcgtgtcgattccattccattatattccattctagtccattccatttcattccactcgggtccattccattcgattccattccattggagtccattgcattccattccattc

SEQ ID NO: 3039 - DNA, 123 bp, Protomyxzoa rheumatica
ctccattccattccattgcattcccttccattccactccactccattccattccattgcattccattccactcaatgctattccactctaatccattccattctgtcccattccattccattc

SEQ ID NO: 3040 - DNA, 169 bp, Protomyxzoa rheumatica
ttgattccattcaattccattccattccactccatggcataccactcgggttgattccattccattctattccattacattaaattccagtccattccattccattcaattccattccattaaattccattccattcgtgttgattccattccattccattccattcca

SEQ ID NO: 3041 - DNA, 145 bp, Protomyxzoa rheumatica
tccattccattctattccataccattccattccattccatatcattccattgcattccattccattccattccgttccattccattctattcagtaccattccattccattctattccatgccatgccattccactcgggttgat

SEQ ID NO: 3042 - DNA, 140 bp, Protomyxzoa rheumatica
cattggagtccattccattacactccattcgtttccattccattccattccattcgagtcctttccattccataccattccattcgagtccattcccttccattactttacatttgagtccattccattccattctattc

SEQ ID NO: 3043 - DNA, 126 bp, Protomyxzoa rheumatica
aaatgcactggaatgacctcgaatagaatgcagtggaatggacctgaatgaaatggaattgaatggaatggaatggacgcgaaagaaatagaatggaatggaatgcaatgcaatgcaatggaatgg

SEQ ID NO: 3044 - DNA, 174 bp, Protomyxzoa rheumatica
aatggggtggaatggaatggaattgattggagagaagtggtgtggagtggagtggagtggaattgagtggaattcagtgggatggaatggagtggagtggagaggaatgtagtggattggagtggaatgtagtggattggagtggaatggagtggaatggaatggaatagagtg

SEQ ID NO: 3045 - DNA, 128 bp, Protomyxzoa rheumatica
cgagtggaatgcactcgagtgcaaattaatcgaatgcaatttaattgaatggaatgaaatccaatggaatagaaaggaaaggaatgcattggaatggactggaatgtaatggactcgaatggattgaa

SEQ ID NO: 3046 - DNA, 131 bp, Protomyxzoa rheumatica
caaccgcaaaggaatggaaaggaatggaatcaagctgagtggaatggcatgcaatggaatggaaaggaatggaatgcaatggtacagaacggaatggattggaacgaaaaggaatggaatggaatggaatg

SEQ ID NO: 3047 - DNA, 158 bp, Protomyxzoa rheumatica
aatcgaaagaaatggaattgaaaggaatggaatcgaatggaatggactgcagttgaatggactcgaatgaaatggactggaacaaaatggaatcaaacggattggaattgatcggaacggaatggaatggaatggaatgcgatggaaaggagtagaat

SEQ ID NO: 3048 - DNA, 139 bp, Protomyxzoa rheumatica
ttcaattccattcgagtccattcctttccattccattccagtcgagtcaattccattccattcaaatcctttccatttgagtccattccattccttacgagttcattccctttgattctattcctttctattgctttcg

SEQ ID NO: 3049 - DNA, 276 bp, Protomyxzoa rheumatica
gaatggaatggagtggaatggaatggagtggaagggaatggagtggagtgtggtggaatggagtggagtggagtggagttgagtggaattgaatggagtgcagtggaatagaatggaatggagttaactggaattttctggaatggagtggaatggactggagtgcaatggaatggtgtggaatgaaatggaatggagtgtaacggagtgtagtgcagtagagtggagtggaatggagaggcctggagtggagtggagtggtatggaatggaatag

SEQ ID NO: 3050 - DNA, 136 bp, Protomyxzoa rheumatica
cgaatctaattgattccattccattccattcccttacattccagtagattccattggattccattccaatgcattccaattcattccattcaataccattccattccattctgttgcactctattccattccattg

SEQ ID NO: 3051 - DNA, 125 bp, Protomyxzoa rheumatica
ctccactccattgcactccactacactccactacactacactccttccattcaactccatcccattccattccactccattacactccacatcaccccacacccctccattccactccattccac

SEQ ID NO: 3052 - DNA, 81 bp, Protomyxzoa rheumatica
gaatcagccctagtggaatggaatcgaatggaatggaatgaaatgcaatggaggtaaatggaatgcaatggaatagaacgg

SEQ ID NO: 3053 - DNA, 122 bp, Protomyxzoa rheumatica
cgttccactccactccactccactccactcctctccattccattccattcaattccattccattctattccactcctttccactctactccactccattgcactccactccactccactcca

SEQ ID NO: 3054 - DNA, 138 bp, Protomyxzoa rheumatica
attccattccattccattccattacattacattccattccattacattccattgcactggtgttgattccattccatttcattctattccattccattgcatgccattccactcggtttgattccattccactccatt

SEQ ID NO: 3055 - DNA, 178 bp, Protomyxzoa rheumatica
tccctccctccctgtctgtctgtttctctctctgtctctgtctctctgtccatctctgtctgtctctttctctttctctctctctgtctctgtctctctctctctctgcctgtctctctcactgtgtctgtcttctgtcttactctctttctctgcctgcctctctgtctgtctgtct

SEQ ID NO: 3056 - DNA, 156 bp, Protomyxzoa rheumatica
cactccattccattctattccttgtgattccattctattccattccatttgattccttgccattcgattgcattccattcgacttcattccattcgagtccattccattccattctgttcaattccaaaacgttcaattccaatttgttccaggcc

SEQ ID NO: 3057 - DNA, 161 bp, Protomyxzoa rheumatica
atggaatggaatggaatggtatggaatggaatggaatggaatgatatggaacagaatcaaattgattcaactggagtggaatggaatagaatggaatggaatggaatggaatgcgatggaaacaacctgagtggaatataatggaatggaatggaagggaa

SEQ ID NO: 3058 - DNA, 142 bp, Protomyxzoa rheumatica
gaatggaatggaatggaatgaaatggaatggaatctacccgagtggaatgcaatgaaatcgaatggagtggaatcgaatggaattgcacggaagagaatggtattgaatcaactggaatggaatggaatgcaatggaatgga

SEQ ID NO: 3059 - DNA, 172 bp, Protomyxzoa rheumatica
tggaatggaatggagtggaatggaatagaatggaatggactcgaatgacatggattctaatggaataaaaatgaatggagtgacatcgaatggaatggattgcattggaattgaatggaatggacccaaatgtaatggactcgaatggaatggactcaaatagaatggactc

SEQ ID NO: 3060 - DNA, 150 bp, Protomyxzoa rheumatica
tacaggaatggaatggagataaaaggaatggaatgcaatggagtcttgtggaatggaatggaatggaaaggaatggagtggtatggaatggagttgagtggagtggaatggaatggagttaaatgagctggaatggagtgtagtgcaatg

SEQ ID NO: 3061 - DNA, 204 bp, Protomyxzoa rheumatica
ccattccattccactccattccattgcattccattccatttgattccattctggttgactccattgctttccattgcattccattccattctattccattcccttccattccccttttgtttattccattccattcctttccattcctttgcattacattccacagggtttgattccattccattccattccactgcattccat

SEQ ID NO: 3062 - DNA, 173 bp, Protomyxzoa rheumatica
attccattccattccattccattccattccattccattcggtaacattccatattgttccattcgattccatttgaatccatccattccagtccattccattcgattccattccattcctttcaattcccttccattccattccattccacttgattccactccattcccttc

SEQ ID NO: 3063 - DNA, 182 bp, Protomyxzoa rheumatica
cattccattccactccattccttgccactccactccactcccctccattccattccgttccactccattccactccactccactcaactccactccacttcattccattccttcccattccattccactccactccactccactccatcccattccattgcattgcatttcactccattcta

SEQ ID NO: 3064 - DNA, 188 bp, Protomyxzoa rheumatica
gtactacaaatatatatattatatatcatatatgatatagtacctttgttatatatcataatacatataaatgtgtattatgttatctataattatataatttcatatataagatgtataatatgtatcatatattatagatgttatgtaatatatatagtatatataagatgacacaggataaatat

SEQ ID NO: 3065 - DNA, 129 bp, Protomyxzoa rheumatica
ttccattccattccattccattccattccattccattcaaattcatttcgttgcattccattctattccgttccattcctttccattaaattccatgccattccactcgggttgattccattcctttcc

SEQ ID NO: 3066 - DNA, 123 bp, Protomyxzoa rheumatica
cggtgtgattcctttccattccattcccttccatttcaatccattgctttcctttccattccaattaatacaattccattctattcgattccattcctttccattccattccattccattcca

SEQ ID NO: 3067 - DNA, 221 bp, Protomyxzoa rheumatica
gagacagagacagagagagagagacagacagacagacagggagggagaaagacagagagagagagagagagacagacagacagacagacagagagagaaacagacagaaagagagagagagagatggagagagagtgagtgagagagagagagagagatatggagggagagagacagacagagagagaaacagacagaaagagagagagacggagagagag

SEQ ID NO: 3068 - DNA, 127 bp, Protomyxzoa rheumatica
ggaatggaatggaatggattggaatggaatggaatgcaatggaatcaacctgagtggaatggaatggattggaaaggaatataatggaatggaaaggaatggaatgaaatgaacccgattggaatgg

SEQ ID NO: 3069 - DNA, 126 bp, Protomyxzoa rheumatica
cactcgggtttattccattcctttccattccattcgggtaaaatccattccaatccattccattccattcgattccattacattgcactccggatgattccattccattccattccattacatttc

SEQ ID NO: 3070 - DNA, 85 bp, Protomyxzoa rheumatica
ccattccattccattctattccactcgtgttgattccattgaatgccattccattccattcgattccattcccttccattgcatt

SEQ ID NO: 3071 - DNA, 125 bp, Protomyxzoa rheumatica
ttccactccactccactcgattccactgcactccactccactccattccattccagtccactgcattccattccattccattctcttccattcctttccactgcactccgatccactccactcaa

SEQ ID NO: 3072 - DNA, 148 bp, Protomyxzoa rheumatica
ttccattccattccattccattccattccattccagttgatgcatttccattgtattccattccattctattccattccattacattccgttccgttcgtttgattggcattgcattccactgcattccattccattccattccattc

SEQ ID NO: 3073 - DNA, 141 bp, Protomyxzoa rheumatica
cattccattccttttgattccattccattccactcgtgtttactccattccactccactccattccattccactcggattgattcagtttcattgctttccattccattccattccattccactctggttgattccattcc

SEQ ID NO: 3074 - DNA, 139 bp, Protomyxzoa rheumatica
attccacgcgatttgattccattccattctattccgtttcattccattccatgccatacgatttcattacattccattccactcgggtacattccattccattccactccattctgatagattccattccattccattc

SEQ ID NO: 3075 - DNA, 199 bp, Protomyxzoa rheumatica
ttccattccacactattgcattccattccattccattccagtctactcgggttcattcaattccattctattccattgctttccattccattcctttgcattccattccattccaaatcattccactccattcgggttcactcaattccattctattcatttccattccattcctttccattgcattccattccattcc

SEQ ID NO: 3076 - DNA, 256 bp, Protomyxzoa rheumatica
aatggaagggaatggaaaggaaaggaatgtaatggaatgtaatggaatggaatcaacacgaatggaatcaatggaattgaatggaatggaatggaacgtagtgaaatacaagggagtggaattgaatcaacccgagtgtaaaggaatggaatggaatggaacggaatagaattgaattaaattaacctgagtggaatggaatggaagggaatggagtggaatggaatggaagggaatagaatggaattgaatcaac

SEQ ID NO: 3077 - DNA, 125 bp, Protomyxzoa rheumatica
tggaatcatcattgaatggaatcaaatggaatcatcgaatggcatcaaatggaatcatcatcaaatggaatctaatgaaataatcgaatggactcgaatggaatcattgaatggagtcaaatgga

SEQ ID NO: 3078 - DNA, 149 bp, Protomyxzoa rheumatica
ccgtaccattccactcctttccattccattcctttccatgccattccactcgtgttgattccattccactccattccatttgggttgattccattgcatttgattccattccattccattccattgctctcgggttgattccattccat

SEQ ID NO: 3079 - DNA, 171 bp, Protomyxzoa rheumatica
ccattccattccattccattccattcctttccattccattgctttccattccattccattccattaaattcggattgattccatttcattccattccattccattccgttcaattccattatattcccttgcattccattccattccattctattccattccattccattc

SEQ ID NO: 3080 - DNA, 257 bp, Protomyxzoa rheumatica
attccattcctttccattccattccattccattccattcggtgccattccattccactctattccattcaagtccattctatttgattccattccattccattcgatgccattacattcaattctattccattcgactccattcaattccattctcttccaaacgattccattccattctattactttctattccaatccattccattcctttccattcgtttccattccattcgagtccactccactccagtccat

SEQ ID NO: 3081 - DNA, 125 bp, Protomyxzoa rheumatica
gagagagagagagagagagaaacagacagggagggagaaagacaaatagagagagagacagacagacacacagaaagacagagacagagagaaacagacagaaagagagagagacggagagagag

SEQ ID NO: 3082 - DNA, 272 bp, Protomyxzoa rheumatica
ctctctgtctctgtctctgtctctctctctctctgtctctccctctctgtgtgtatcttttgtcttactctccttctctgcctgtccgtctgtctgtctgtctgtctgtctctctctccctttctgtctctctctctctctctctgtccctctctctttctgtctgttcctctctctctctctgtctctgtctttctctgtctgtctgcctctctctttctttctctttctgtgtctctctgtctctctctctgtgcctatcttctgtctta

SEQ ID NO: 3083 - DNA, 137 bp, Protomyxzoa rheumatica
atggaatggaatggaatggaatggaatggaatgggatggagtagagtggaatggaaaggagtggagtggaatgtaatggaatgtaatggaaaggaatgggatggagtggagtggaatggaaaggagtggagtggaat

SEQ ID NO: 3084 - DNA, 178 bp, Protomyxzoa rheumatica
cgattggaaaggaatggaatggaaaggaaaggaaaggaatgcaatggaatggaatgcaatggaatgcaatggtatggaatggagtcaacccgagcggaatggaatgcaattgaatggaatgaaatggaatgcaatggaatgcaaaggaatggagtggaatggaataaacaccagtgga

SEQ ID NO: 3085 - DNA, 152 bp, Protomyxzoa rheumatica
gagaaagacagagatggacagagagacagagagaaacagatagaaagagagagacagagagagagagaggcagaggcagagacagagacagggagaaagagagagacggacagagaaagacagagatggacagagagacagagagaaacaga

SEQ ID NO: 3086 - DNA, 178 bp, Protomyxzoa rheumatica
cattccattccatttcattccattgcattccattccatttcattcctttgcattccattccttttcattccattgcattccattccattgcattctattcaattccattccatcccattccattccatttctgtgaactccactccactccactcaattccattccatcccattccat

SEQ ID NO: 3087 - DNA, 177 bp, Protomyxzoa rheumatica
ggaatggaatggaaagaagccgattggaatgcattggactgcaaaggaatggaattgaaagggatggaatggaatggaacggaatgcaaaggaatggaaaggaatggaatggaatggaattgaatggagtcaatgcaagtgtaattgaatggaatggaatggaatggaatggaatgg

SEQ ID NO: 3088 - DNA, 171 bp, Protomyxzoa rheumatica
ggaatggaatggaatggaatggaatggaatggaatagaattgaatcaagcctagtggaatggaatttaattgaatgaaatggaatagaatggagtggaatagaatggaattgaatcaactggactcgaatggaattgaatggaatagaatggaatggaatggaatggaatc

SEQ ID NO: 3089 - DNA, 183 bp, Protomyxzoa rheumatica
ttgtttccattctattcttttccattccattcccttcccttccattccactcgggttgattccattcctttccattcctctcgatttcattcccttccattccactcggaaggattccattcctttccattccattccactccattgcatttcattccaatccattccattccattccattcc

SEQ ID NO: 3090 - DNA, 158 bp, Protomyxzoa rheumatica
ttccattcctttccattccattccactccattgcaatcgagttgattccattccattcaattccactccattccattccattccattccattccggatgattgcattccatgacattccattccattccattcccctgcactcgggttgattccattc

SEQ ID NO: 3091 - DNA, 178 bp, Protomyxzoa rheumatica
tggaatcgaatggagtggaatcaaatgaattgcactggaatgcaatggactcgaatggaatggactggaataaaatggaatcgaacggaatggaatagaacataaagaaatggaatggaatggattgcaatggacactaatgaaatggagtcgaatgtaatggaattgaattgaatgg

SEQ ID NO: 3092 - DNA, 153 bp, Protomyxzoa rheumatica
ccattccatttctttccatttcattccattcctttccactcgggttgattcagttctattccattccattaaattccattccacttgggttgattcaattccattctattccgttccatcgcactccattccattccattccattccattcca

SEQ ID NO: 3093 - DNA, 128 bp, Protomyxzoa rheumatica
attgaaatggaagggaatggaatggaaaggaatcacaccgagtggaatagtatggcatggaatggaatgtaatcaaccagagtggaaaggaatggaatggaattgaaaggaaaggaatagaatggaat

SEQ ID NO: 3094 - DNA, 98 bp, Protomyxzoa rheumatica
ggaatggaatggaattgaaaggaaaggaatagaatggaattttatcaactcgcgtggaaaggaatggaatggaatggaatagaatggaattgaatcaa

SEQ ID NO: 3095 - DNA, 135 bp, Protomyxzoa rheumatica
tccattccattccattaaattccattccactcgggttgatgccattcctttccattccattcgtgttgaatccattccattccattcctttactttcgattccattccattgcactcgggttgaacccattccat

SEQ ID NO: 3096 - DNA, 204 bp, Protomyxzoa rheumatica
tccattccattccattccattccattccattccattccacgtggattgattccattccctttcattccattccattccattccaatccatttcactcttattggttccattccattgcattgcattccatttcatgccattccattccactcgggttgattccattgcatgccattccattccattaaattctattccgttcct

SEQ ID NO: 3097 - DNA, 114 bp, Protomyxzoa rheumatica
ttgcattccaccacactccattgcactccactccactccactccattctactccattcctttccattccactccactccattccattcaattccactccagtccatttcacccc

SEQ ID NO: 3098 - DNA, 81 bp, Protomyxzoa rheumatica
actccattccattcaattccactccagtccatttcaccccactccagtccattccactccactccatcccattccactcct

SEQ ID NO: 3099 - DNA, 175 bp, Protomyxzoa rheumatica
tgaatggaaaggaatggaatggaatggaatggaatggcatagaatggaattgaaccaacccgaatgaaatggaatggaatggattcgaaaggaatggaatggaatggaatagaatggaattgaatgaatacgagcagaatggaatggaatggaatggaatggaatggaatggaat

SEQ ID NO: 3100 - DNA, 142 bp, Protomyxzoa rheumatica
ctccattcctctccactccattccactctactccactccaattcactccactccattccattgaatttcactgcactccgatccattccactcaactacactacactacactacactacaatacactacacttcgttccatt

SEQ ID NO: 3101 - DNA, 105 bp, Protomyxzoa rheumatica
atggaatggagtggaatggaaaggagtggagtggaaaggaatggaatgcagtggaatggaatggtatggaatggagtggaatggaaaggagtggagtggaaagga

SEQ ID NO: 3102 - DNA, 280 bp, Protomyxzoa rheumatica
aatggaattgaatcaacacaagtggaatggaatggaatgggacggaattgaatggaatggaatagaatggaattgaaacaaccggagtggaattgtttggaatggaatgcaatggaatgcaattgaagggaatggaatggaatagaatggaattgaatcaacacgtgaggaatggaatggaattgaacggaatggaatgtaatggaatagaatggaattgaaccaacacgttgggaatgtattggaatggaatggaatggaatggaatggaatggaatta

SEQ ID NO: 3103 - DNA, 142 bp, Protomyxzoa rheumatica
gtccattccattccagtccattacattcgattccattccaatacattccattccattccattcctgtccattccattcgaatcaattccgttgcattccattccattacattcatttccatttgttttcattccattccatt

SEQ ID NO: 3104 - DNA, 141 bp, Protomyxzoa rheumatica
ccattgcactcgggtttattccattcaattccattccattacagtccattccaatagattccattcctttgccttccattcgaatccattccattctagtccattccattccattccattctattcctttccaatccattc

SEQ ID NO: 3105 - DNA, 155 bp, Protomyxzoa rheumatica
ccattccactggtgtttattccattccactccattccattaaataccattccattcgatttcattccattccattccactcggtttgactccattccataccattgcactccattgcattccattcgtttcctttccattcctttcctttctatt

SEQ ID NO: 3106 - DNA, 147 bp, Protomyxzoa rheumatica
ttgtgccactgcacgccagcctttgtggcagagtgagaacctgtggaaagaatggaatggaatggagtggaattgtatggaatggaatggagtgaagtggagaggagtggagtctagtggaatgcagtgtaaaggaatgtgatggaa

SEQ ID NO: 3107 - DNA, 153 bp, Protomyxzoa rheumatica
atggaatggaatggaattgaatggaatggaatggaatcaacccgagaggaaaggaatggaatggaattgagtggaatgtaatgtaatgtaaaggaatggaatggaatcaccacgaatggaatggaacggaatggaatgggatgggatggaatg

SEQ ID NO: 3108 - DNA, 177 bp, Protomyxzoa rheumatica
gagtggaatggaatggaatggaatggaatggaattgaaagaacccgagtggaatgcaatgcagtggaatggaatggattggaatcaacccaattggaatggaatggaatggaatggaacggaatggaatggaaaggagtggaatacaatggaatggaatgcaatagaatggaattga

SEQ ID NO: 3109 - DNA, 142 bp, Protomyxzoa rheumatica
tggaatggaatggaatggaacttaatggaatggattcaacccaagtagaatggaatggaatgaaatggaatggaaaggaatggaaaggaatggagtggaatggaatcaacgggagtggaatggaatggaatggaatggaatg

SEQ ID NO: 3110 - DNA, 256 bp, Protomyxzoa rheumatica
ctgtctctctctttccttctctctgtctctctctgcctgtctctctcactctgtcttctgtcttactctctctctctgcctgcctgtctctctcactctctctctctgtgtgtctctctctctctttctgtttctctctgtctctctgtccgtctctgtctttctctgtctgtctctctctttctcctgtctctgtctctgcctctctctctctctctgtctgtctctctcactgtgtgtgtctgtcttctgtctt

SEQ ID NO: 3111 - DNA, 148 bp, Protomyxzoa rheumatica
cattccattccagtacattccattccattccattccattccattccattcgagtgcatttcattaaattccattccattccattccatttgagttcattccattctgatacattccattctattcgagtccattcaattccattccat

SEQ ID NO: 3112 - DNA, 174 bp, Protomyxzoa rheumatica
ttccattccattccattccattccattccactcgggttgactccattccattccattccatgccattccaatccattccattccactcggtttgattctattccattcaattccattccattccacaccattgcattccattccattccattccactctactcgggttcattca

SEQ ID NO: 3113 - DNA, 157 bp, Protomyxzoa rheumatica
tcattccattccattccactccactcccctatatacatcccactccattacattccattccattacactccactccactccattccactctatgccactccactccatgtcattccatcccattacattccactccattccactccactccactcca

SEQ ID NO: 3114 - DNA, 154 bp, Protomyxzoa rheumatica
tggaatgcaatggaatggaatcatccggaatggaatggaacggaatggaatgcaaaacaattcaatcaactcgattgcaatggaatggaatggaatgtatatgaatagaatggaatcaacccgagcggaatggaatggaaaggactggaatgga

SEQ ID NO: 3115 - DNA, 138 bp, Protomyxzoa rheumatica
aatggcgtggaacagagtggaatggaatggagtggagtggaatggaatggagaggactggagtggaatggaatggaatggagtggcgtggagtggaatggaatggagtctagttgagtggagtggaatggagtggatt

SEQ ID NO: 3116 - DNA, 338 bp, Protomyxzoa rheumatica
tccagtccattccattcgagtccgttccattccagtccgttccattcgagtcaattccattccatttgatatctttccataacgatccattccattctatccctttcaattccattcaattccattccattccatttcattccattcgattcccttccattgggctcctttccattcgagtgcattccattccgttccatttctttctgttctgtatgattcctacctttcaatttcatttttttccagtctattcctttcacgtccattccattccatttcactccattcaattccattccactcgattcccctccgttccatttcattgcattcca

SEQ ID NO: 3117 - DNA, 123 bp, Protomyxzoa rheumatica
tggaatggaaacaagaggaaaggaatggaatggaaaggaatggaatgggaaggaatagaatggaatgaaattggatggaatggaatggaaaggggtgaaaaggaataaaattcaaaggaatgg

SEQ ID NO: 3118 - DNA, 159 bp, Protomyxzoa rheumatica
tgattccattccattccattccactccactccactccattgcattccattccactcgggttgattcaaatccattgtattccgttccactcgggttgtttccattccattccagtaatttccattccaatccattccattccattccattccattccat

SEQ ID NO: 3119 - DNA, 130 bp, Protomyxzoa rheumatica
gaatgtaatggagtggaatgtaatggaatttagtggaatgcaatggaatagaatggaatgaaatggattggatcggaaaggaatccaatggaatcaagtggaatgcaatagaatggaatggaatggaatg

SEQ ID NO: 3120 - DNA, 128 bp, Protomyxzoa rheumatica
attctattccgtaccattccattccattcctttccattcctttccattctatgccatttcactcgggttgattccattcctttccattagcttcaggttgaatacattccattccattccattccatt

SEQ ID NO: 3121 - DNA, 339 bp, Protomyxzoa rheumatica
ccattccattccattctattccactcgtgttgattccattccattcgattccattcctttgcattccattccacttgtgttgtttccattccattccaatcgattcaattcaattccattcaatgccattcgattccattccattccatttcactagggttgattcaattccattctattgcattgcattccattccattgtattcccttgcattccattccattccaatccactcgtgttgattccatggaataccgttgcattccattcttttccactcccgttgattccattccattccattccactccaaaatgttgattccattccattccatt

SEQ ID NO: 3122 - DNA, 128 bp, Protomyxzoa rheumatica
ccattccattccattccattacacacgggttgattcaatttcattctattccattacattccatttaactccatcccattccattccattccgttcggattgattaaattccattctaatccattcca

SEQ ID NO: 3123 - DNA, 100 bp, Protomyxzoa rheumatica
ggaatggaatggaacggaacggaatggaatggaatggaattaacccaaatagaattgaaaggaatggaatggaacggaatggaatggaatggaatggaat

SEQ ID NO: 3124 - DNA, 202 bp, Protomyxzoa rheumatica
caactcgagtgcaatggaatggaatggaatggaatggaatcaaccagaatagaatggaatggaatggattcaacacgagtggaatggcattgaatggaaaggaatggaatggaatggaatggtacggagtagaatggaatggaacgaaatggaacggaatagattcaacctaattggaatggaatggaatggaatggaatgg

SEQ ID NO: 3125 - DNA, 239 bp, Protomyxzoa rheumatica
aatggaatggaatggaatggaatggaatggaatggaatcagcaagattggaatggaatggaaaggaaaagaatggaatggaatgaaatggtatggaatggaaactaatggaatggaatggaatggaatggaattgtgtggaatggaatgcaatgcaatggagtgtaaaggaattgaatagaatccacccgaatggaatagaatggaatagaacggaaaggaatggaatggaatggaatg

SEQ ID NO: 3126 - DNA, 136 bp, Protomyxzoa rheumatica
gagtggaatggaatggaatcaaaaggaatggaatggaatggaatggaatgcaatcaacccgagtggaatggattggaatggaatggaatggactggaaaggaatcaacacgagtggaatggaatggaatggaatgg

SEQ ID NO: 3127 - DNA, 299 bp, Protomyxzoa rheumatica
catttcactcggggtaattccattcaattccattccattctattccatttgggttgattccaatccattccattccattcaattccattcaactctggttgattccattcaattccgttgctttccattccattgcatttcattccattccactcaggttgattccattccattccattcaattccgttaaattccattccattcctttccattccatttcactcgggttaattccattcaattcattccattccattccactcgcgttgattccattccattccattccattccattc

SEQ ID NO: 3128 - DNA, 164 bp, Protomyxzoa rheumatica
ccatgctgttgtattccattccacctcactccactccacttcattccactccttcccatgccattccattccactcgattccattctatttcattccattccactccactccattccgttgcactccattcaatttcactccattccattccactccattccat

SEQ ID NO: 3129 - DNA, 137 bp, Protomyxzoa rheumatica
attccactccattccatttcattccattccactctattccattcgattccattcgattccattccattccactacattccactccaatccatttacctacatgccactccactccgttcttctccgttccattctat

SEQ ID NO: 3130 - DNA, 132 bp, Protomyxzoa rheumatica
ggaatggaatagaatggaatggaatagaatggaatggaatagagtggaatcaacgcgattggaatggaatggaatggaatggatgcaacccgagtggaactgaatggaatggaatggaaaggaatggaatgg

SEQ ID NO: 3131 - DNA, 102 bp, Protomyxzoa rheumatica
ttgagtggagtggatcggagtgcagtggaaaggaatggaatagaatggaatggaatgcagtggagtggaatggaatggagtggaatggagttgagtggagtg

SEQ ID NO: 3132 - DNA, 325 bp, Protomyxzoa rheumatica
aaggaatggaatggaatggaatagaatggaattgaatcaacccgaatggaatgcaatggaatggaacggagcggaatggaatgcaatggaacagaatggaatagaatcaacccgagtggaatgcaatggaatggaatggtatggaatagaatggaatggaatggaatacaacagaatggaatgaacccgagtggaaaggaatggaatggaatggaatataacggatttaactggaatgtaatggaatggaatggaatggcatttaatcgaatagaaaggaatagaatcaactgaaatcgaatggaatggaatggaatggaatgga

SEQ ID NO: 3133 - DNA, 144 bp, Protomyxzoa rheumatica
ggaatggggtggaatagaatggaatttaatcaacacgagtggaatagaatggaattgaatggaaaggaattgaatggagtggaatagaatggaatgaaattgaatggaatgcaatggaagtgaatggaatagaatggaattgaa

SEQ ID NO: 3134 - DNA, 122 bp, Protomyxzoa rheumatica
gtactctgatccactctgctcaattccactccactccactccattcccttccgttccattccatttctttccactcctctccattacattctactccattccattccactccatgccactgc

SEQ ID NO: 3135 - DNA, 192 bp, Protomyxzoa rheumatica
ggaatggaatggaatggaatgaaatagaatggaatagaatcaactcgagtggaatggagtggaatggaatgcaataaaatggaatggaatcaactcgaatgcaatggaatggaattgattggaatggaatggaagggtatggaatgcaatagaatggaatggaatcaactctagtggaatggaatggaatgg

SEQ ID NO: 3136 - DNA, 97 bp, Protomyxzoa rheumatica
aatggaatggaaccaataagagtggaatggattggaatggaatggagtggaatgaaacggaatggaatcaaccagagtggaatggaatggaatggaa

SEQ ID NO: 3137 - DNA, 164 bp, Protomyxzoa rheumatica
ttctattccatcccattccattccattccatttcactcagtttgattccaatccattccattccattccattccactccattccattcgattccattccattccacttgggttaattccactccattccattccattcaatttcattccattccattccactcg

SEQ ID NO: 3138 - DNA, 353 bp, Protomyxzoa rheumatica
cactccattccattccattccactccattccagtccatttcattcctctcctctccactctattccactccattccaatccattccattccagacaactccattccaatccactccatttcactcctctccatttcactccactccactatacaccactccagtccactccattccattgtattccactccactccagtccactccattctcctccactctgctccattcaattcaactcccctccgtacaactccattccactccactcctttccattccattacattccactgcactccattccaatccacttcactccattccacttctctcctttccaatccactccat

SEQ ID NO: 3139 - DNA, 182 bp, Protomyxzoa rheumatica
gaaaggaattcaccagaatggaatggaatggaatggagtgcaatggaatgcaattgaatggaatggaatggtatgcaatggaatggacttgaatggaatagaatggaatggaatggattggaatcgaaaagaatggaatggcatggaaaggaatggaatggaatggaatggaatggaatgga

SEQ ID NO: 3140 - DNA, 161 bp, Protomyxzoa rheumatica
ggaatggaatgcaatggaatggaatggaatggaatggaatgctgtggaatggaatcaaacctagtgcaatggaaaggaatggaattgaatggaatggaatggattggattcaacccaaatcgaatggaaagcaatggaatcaacccgagtggaatggcatg

SEQ ID NO: 3141 - DNA, 172 bp, Protomyxzoa rheumatica
catttgattccattccactcggtttcattccatttgaatccactccattctattccattccattccattcagttccattctattctgttctattccattccgttccattgcattccattccattcggtacctttccatattgttccattcgattccattcgaatccattcca

SEQ ID NO: 3142 - DNA, 125 bp, Protomyxzoa rheumatica
aatggaatggaatggaatggaatggaatggactggaatgggatggaatggaatgaaaccgagtggagtggaatggaattgaatgaaatggaatggaataaactgcaaatgaaaggaatggaatgg

SEQ ID NO: 3143 - DNA, 150 bp, Protomyxzoa rheumatica
tatgtactggaatggaatggaatcacatggaatgggaacgaatggaatggaatggaaaggaatggaatcgaatggaagggaatgaaattgaatcaacaggaatggaagggaatagaatagacggtaatggaatggagatcggaagagcgg

SEQ ID NO: 3144 - DNA, 162 bp, Protomyxzoa rheumatica
tcgactcaacccgagaggaattgaatggaatggaatggaatggaatggaacggaattcaatataatggaattgagtcaaccggagtggaattgaatggaatggaatggaatagaaatgaatggaatcagccctagtggaatggaatcgaatggaatggaatg

SEQ ID NO: 3145 - DNA, 242 bp, Protomyxzoa rheumatica
attccattccattccagttgattccattggattccattccaatccataccatttcattccattccattccattccactcgggtttattccactccatcccattgcattacattccatttcattccactcgggttaattccattccgttccattccattccactcgtgttgattccattcctttcctttctatttcattctactccattccattccattccattccattccatgccattccat

SEQ ID NO: 3146 - DNA, 144 bp, Protomyxzoa rheumatica
attccattcctttccattccaatttattccattccattccattcaattcccttcctctccactcggtttgattccattccatcccattccattctataccattccattccattgcattccattccattcgattccattcgggtt

SEQ ID NO: 3147 - DNA, 160 bp, Protomyxzoa rheumatica
ctccattccattccattcctttccgctcgggttgattccattctattccatcccaatccattccattcctttcgggttcatttcattccatttctttccattccgttccgttccattccgttccattccattcctctcgtgttgattccacaccattcca

SEQ ID NO: 3148 - DNA, 173 bp, Protomyxzoa rheumatica
gaatggaatggaatcaactcgagtggaatggaatggaatgtaatggaatggattcgaatggaatggaatggaatggacccgagtggaatggaacagaatggaatggaatggagaggaatggaatgaaatggactcgaatggaatggaatgaaatggaatggaatggaatggaa

SEQ ID NO: 3149 - DNA, 122 bp, Protomyxzoa rheumatica
actcctatccactccatttcactccattccattaaattccattccattccattcctttcattccattccattccattcgtttctatttcgttccatttcattccattccatttcattccatt

SEQ ID NO: 3150 - DNA, 159 bp, Protomyxzoa rheumatica
ccattccattccattccattccattccattccattcccctgcactccgatccactccactaaactccactccactccactctgttctgttccgttccattctattccgttccattccattccatttcgttcctttccattcaattccactccactccat

SEQ ID NO: 3151 - DNA, 682 bp, Protomyxzoa rheumatica
tattacatatttacataaaatattatacagttatatataatttcaaatagttatatataacagaatataaatcatatagaatacatatcataaaatatatattgtataccatatatattaggaatcatatattgtatgttatatatcatatactgtatatcatatatcatatattatatgttatatatatcacattccacatattgtatattataaattatacataatatattgcattctttattttacatgtaataaattatacattataggtaacatagtatatattgtatgcaaccggtatattctatgtaaaatatataatatataacacatgtgacatgtaattaataacatagtcatataatatatatttaatataggtattatacatacaacgtattatatataatatatattacatatgttataaaatataatatatattatatgtcgcattttatatatacaattatatattattatatgttgttttatactatatataacatagacataatatatatattatgcataatgggtattatatataacagatatattatatataatatatataatgtataatttatatttaatacgtatattaaccgtataatatattctatatatgacatataacatatattatatatgtcataaattataatatatactatat

SEQ ID NO: 3152 - DNA, 191 bp, Protomyxzoa rheumatica
ttccattccattccattcgggttgattccattccattccattcatttccattccattccattacattccacttgggttgactgcattccattcctttccattccattccaatcgggttgattccattccattgcaatccattccattgcactcgggttgaatccattccattccattccattccattccat

SEQ ID NO: 3153 - DNA, 92 bp, Protomyxzoa rheumatica
cgactcgaatggattggaatcaaatataatagaatgtaatgtaatgtaatataatggaaaggaatggaatcaaatggaatgaactcgaatgg

SEQ ID NO: 3154 - DNA, 216 bp, Protomyxzoa rheumatica
tgatatcaaatggaatggaatggaagggaatggaatggaagggaattgtaccaaatgtaatagacttgaatggaatggaatcatatagaatggactcaaaagtaatggcctcgaattgaatttatagatatagaatggaatccaatggaatgcaactgtatagaatggaatagaatggaatggaatcaaatggaatggaccagaatgcagtggact

SEQ ID NO: 3155 - DNA, 124 bp, Protomyxzoa rheumatica
ttccattccattccattcaattccattccaatccattgcattccactcttgttgattccatttctttccattccattccattccattcaacccggattgattccattccattccattccattcc

SEQ ID NO: 3156 - DNA, 177 bp, Protomyxzoa rheumatica
tattccattccacttcattccgttccattccactccattcaattccattctattccattccattccactccattccattccactcgggtggattgcattgcattccattccattcaattgcacttgggttgattccattccattccattccatacctttccattccattccattcca

SEQ ID NO: 3157 - DNA, 210 bp, Protomyxzoa rheumatica
cctatcttctgtcttactctctttctctggctgtctgcctgtctctctctctctctctgtctgtctccgtccctctctccctgtctgtctgtttctctctctgcctctctctctctctgtctgtctctttctctgtctgtctgtctctctctttctttttctctgtctctctgtctctctctgtgcctgtctctctgtctgtgcctatct

SEQ ID NO: 3158 - DNA, 331 bp, Protomyxzoa rheumatica
atggaatggaatggaatggaatggtatggaatggaatggattggaatggagtaaaaacgagtggaatggaatgcaatggaatggaattcaatggaatagaatgtaattcaatcaacccgagtggaatggaatggaatggaattgaatggaatggaatttaatgtaatggaatggattgaaatgaaatggaacggaatggaatggactggaattgaatcaacatgagtggaatggaatggaatggaatggaatagaattgaatgcagtagaagggaattgaatcaacccgattcgaatggaatggaatggaatggaatggaatggaatggaa

SEQ ID NO: 3159 - DNA, 138 bp, Protomyxzoa rheumatica
aatgaaatggaatggaatggaattgagtggaaaggaaaggaatggaatggaattgagtggaatgtaaagaatggaatggaatggaatcgaatagagtgtaatagaatggaatcgaatcaaatcaaatggaatcgaatg

SEQ ID NO: 3160 - DNA, 127 bp, Protomyxzoa rheumatica
cattccattccattcaattccattacattccaatccactgcattccaatcgggttgattccattccattcgattccattccactccattacaatcgggagaactccattccagtccattccattcca

SEQ ID NO: 3161 - DNA, 127 bp, Protomyxzoa rheumatica
cactccattccactccactccactccattccactccactcgactccagtccactccactccattccattctaccacattccattccgttcctttatttcaactggatctcactctgtcacccagact

SEQ ID NO: 3162 - DNA, 124 bp, Protomyxzoa rheumatica
ttcgagtccattcctttccattgtagttcattccataccattccattcaataccattccgttccattccattccattcgaatccattcatttcccttccatataatttgtgtacattccattca

SEQ ID NO: 3163 - DNA, 112 bp, Protomyxzoa rheumatica
ccattccattccattccgttccattccattccattccattgtactcgggatgattgcattccaatgcattccattccattccattccgttgcattccattccattacattcg

SEQ ID NO: 3164 - DNA, 163 bp, Protomyxzoa rheumatica
cacccgagtagaatggaatggaatggaatggaatagaatggaattgattcaacccgagctgaatggaacgcaatggaattgaatggaaagtgatggaatggaatggaatggaatggcatagattggaattgaatcaacccgaatggaatggaatggaatggaa

SEQ ID NO: 3165 - DNA, 162 bp, Protomyxzoa rheumatica
gtggaatggaatggaatggagtggaatggaatggaatgaagtggaatggaatggaatgcagtggagaggagtggagtgcagtgaaatggagtggagtggaatggaatggactggagtggaatgaaatggaatggaatggagtggattgtagtggaatggaat

SEQ ID NO: 3166 - DNA, 135 bp, Protomyxzoa rheumatica
aatggaatggaatggaatggaatggaatggaattgaatggtatggattagaatggactggaacaaaatggaatgaaatggattcaacccaattgtaatggaatggaatggaatggaattgtgtggaatggaatgg

SEQ ID NO: 3167 - DNA, 169 bp, Protomyxzoa rheumatica
attccattccattccattcctttccattccattccattcccctccattccactcgggttgattcgattcctttctattccactcgattacattcccttccattccactcggaatgattccattccattacattccattccattgcattccattccaatccattccattc

SEQ ID NO: 3168 - DNA, 134 bp, Protomyxzoa rheumatica
atggattcaactcgattgcaatggaatggaatggaatggaatggaatcgagtggaatgaaatggaattaaccggaatagaatggaatggaaagtaatggaacggaatggaatggaatggaatggaatggaatgg

SEQ ID NO: 3169 - DNA, 128 bp, Protomyxzoa rheumatica
cttacactccattacattccattccattcgggtagtttcccttccattccattccattcctctccattccgttgaactcgggttgattccattccatgcattccattccattccattcaattccattc

SEQ ID NO: 3170 - DNA, 125 bp, Protomyxzoa rheumatica
cattccattacagtccattctattccattccattccattcaattcctgtccattccattcgagtccattccattccattctattgctttcgagtccattccattccacttgagtccattccattc

SEQ ID NO: 3171 - DNA, 188 bp, Protomyxzoa rheumatica
ccattccattccattcccctgcactcgtgtttattccattccattccattgtattccattccattcccttcctttccattccattccattccattccattccattctattccgttccgttccactccattccattccattccattctatttggttaattccattccattccattcgattgcaatcgag

SEQ ID NO: 3172 - DNA, 150 bp, Protomyxzoa rheumatica
aacccgagtggagtgcagtggaatggaatcaaatggaatgtagtggaaagcaatgaaatggaattgaatggaatggattggaatgtaatggaatggaatcaaacctagtgcaatggactagaattgaatggaatggaatggaatggaatg

SEQ ID NO: 3173 - DNA, 136 bp, Protomyxzoa rheumatica
ggaatggattggaatggaatgcaatggaatggaatggaatgcaatggattagaatgaaatggaatcaactcgagtgcaatggaatgtaatgcattggaaaggaatggaatggagtggaatggaatggaatggaatg

SEQ ID NO: 3174 - DNA, 246 bp, Protomyxzoa rheumatica
cattccatttcattccattccattccattccattccactccattccattcagtgtgattccattccattccattccattccactctgtttgactcagttccattccattccattccacgttatttgattccattccattttattccgtttcattccattccacgccataagattccattccattccattccactcgggtacattccagtccattccattccattccattccattccattccattcc

SEQ ID NO: 3175 - DNA, 95 bp, Protomyxzoa rheumatica
aatggaatggaatggaatggaaaggaatggaatggaatcacctcgagtggaatggaatggaatggaatggattggaatggattgcaatggaatga

SEQ ID NO: 3176 - DNA, 172 bp, Protomyxzoa rheumatica
ggaactgaatcaaacagagtggaatggaatggaatggaatggaatcttcccgaatggaatcgagtggaatggaacggaatggaatggaacggaatggaaacaaccagagtgcaatgcaatggtatggaatgaaatggaatggaatggaatggaatggtatggattcaacccg

SEQ ID NO: 3177 - DNA, 188 bp, Protomyxzoa rheumatica
tggaatggaatggaagggaatagaatggaattgaatcaactcgagtggaatgtaatgtaatggaatggaatggaatagcatggatttgaatcaacaccgagtggaatgggatggaatggtatggaatggaatggaatggaaagtaattgaatggaatggaatagaatggaattgaatcaacccgagtg

SEQ ID NO: 3178 - DNA, 129 bp, Protomyxzoa rheumatica
ggaatgtagtggagtggaatggagtgagtggaacggagtgaaatggagtggaatggaatggagtttagtggtgtggattggagtggaatggagtggattggaacggattgaaatggagtggaatagaat

SEQ ID NO: 3179 - DNA, 149 bp, Protomyxzoa rheumatica
tcaagtcgaatggaatggaaaggaatggaatcaaccggagtggaatagcatggaatggaatggaatggaatggtccggaagagaatggaatggaacgaaatgaaatggaatggaatggaatggattggaatggaatagaatggaatgga

SEQ ID NO: 3180 - DNA, 214 bp, Protomyxzoa rheumatica
gaatggaatggaatggaatggaatggaatggaatcaaatggatttgaatcaacctgcgtggaatgtagtggattcgaatggaatggaatcaaccagataggaatggaatgaaatggaatggaatgcaatggaattgaatggaaaggaatggagtcaaccctactggaatggaagggaatggaatggaaaggaatggaatggaatggaatggaat

SEQ ID NO: 3181 - DNA, 179 bp, Protomyxzoa rheumatica
gaatggaatggaatcgtatggcgtggaatggaaagaaacgtaatagaatggaatggaatcaaatcacgtggaatggaatgtaatggaactgaataaaacagagtggaatggaatagaatggaaaggaatggaatggaataatcccgaatggaatggagtggaatggaatggaatggaat

SEQ ID NO: 3182 - DNA, 153 bp, Protomyxzoa rheumatica
ccattccactcgggttcattctactccattccattccattacattgcattacattccactggggtttattcctttccactccaatccattccattccattccactcgtgttgattccgttcaatgccattccattccattcgattccattccc

SEQ ID NO: 3183 - DNA, 220 bp, Protomyxzoa rheumatica
ccacgtggtatggaatggaatggaaaggaatggaatggagtggaatagaatggaatggaatggaatgcaatggaatacaatggaatagaatggaatagaatggaattaaatcaactcccttgtggaatggaagggaatggaatttaacggaatggaatggaatggagtgcagtggaatggaatggaagggaatggaaaggaaaggaatgtaatggaatgt

SEQ ID NO: 3184 - DNA, 146 bp, Protomyxzoa rheumatica
aatggaatggaatggaatggaatcaacccgagtagaatggaaatgaatggaatggagtggaaaggaatgcaatggaatggaatggaattgaatggaatcaaccggagtggaatggaaaggaatggaatggattggaataaacacga

SEQ ID NO: 3185 - DNA, 218 bp, Protomyxzoa rheumatica
atggaatggaatggaatggaatggaatggaatggaatcaattcgaatggaatggaaaggaatggaatcaacccgagcggaatggcatggcatggaatggaatggaacggaatggagtggaatggaatggaatggtacagaatagaatggaatggaacgatatggaatagaatggaatgcaatggaatggaatggaatggaatggaatggaaaggaatg

SEQ ID NO: 3186 - DNA, 216 bp, Protomyxzoa rheumatica
atggaatttaatggaatggaatggaatggaatcaacctgagtggactggaatgaaatggggtggaatggaaagcaatggatttgaatggaatcagccagagttgaatggacttgaacggaatggaatggaatggaatcaacccaaatggaatgtaatggagtggaattgaatggaattaccccgagtgaaatggcatggaaaggaatggaatagaa

SEQ ID NO: 3187 - DNA, 151 bp, Protomyxzoa rheumatica
ccattccattccattccattccattccattccattccgcttcactccactccactccactccgttccattccactccactccactccgttccattccattccttccctttccattccactccactccattccactccactccattgaattc

SEQ ID NO: 3188 - DNA, 131 bp, Protomyxzoa rheumatica
gtttgtgaactttgatattgcatgtacagtatataatatacatttggggtactttggtattttatgtactgtatataatttatatttgatgtattttcttattttatgtacctaatataatatatatttga

SEQ ID NO: 3189 - DNA, 162 bp, Protomyxzoa rheumatica
cccttccattccactgcattccactgcattccactccactctattcctctctactctattccactccactccattccattccactctattacactctactccacaccactccactctattccactacattccattctattccactcaactccattttattcc

SEQ ID NO: 3190 - DNA, 137 bp, Protomyxzoa rheumatica
atggaatggaatggaattgtgtggaatggaatggaatggagtgtgaaggaattgaatagaatgaacccgaatagaatggaatgtaatgaaatggaaaggaatggaatggaatggaatggaatggaatgcaatggaat

SEQ ID NO: 3191 - DNA, 150 bp, Protomyxzoa rheumatica
aatggaatggaatggaatggaatggaatggaatgaaatgggaatgaaatggattggatcggaatataatccaatggaataaactggaatggaatggaatggaatgaaataaaatggattggattggaatggaatccaatggaatcaactg

SEQ ID NO: 3192 - DNA, 138 bp, Protomyxzoa rheumatica
ttccattccattccattccattcgggttgattcaattccattctcttccattccgttccattctttccattccattccgttccattccatgccactcaggttcatttcattccattccattccattccattccattcc

SEQ ID NO: 3193 - DNA, 175 bp, Protomyxzoa rheumatica
ctcagctggcgattatcaagcagatgatcgggcaggtgtcacgtggctcagctggcgattatcaagcagatgatcgggcaagcgtcacacggctcagatggcgattatcaagcagatgagcgggcaggtgtcgcgcggctcagctggcgattatcaagcagatgagcgggcaggt

SEQ ID NO: 3194 - DNA, 125 bp, Protomyxzoa rheumatica
atggaatggaatggaatggaatggaatggaataaattcgaatggaatggaatggaatgcaatgtaatatgatggaaaggaatagaatccacccgaatggaatggaaaggaatgcaatggaatgga

SEQ ID NO: 3195 - DNA, 154 bp, Protomyxzoa rheumatica
cattccattcgagtccattccattccagtccattacattccattcaattccattccatttcattccactccattccattcgaatccattgcattccaatccattcccttccatttctttccaatctattccattccattccatttgattccatt

SEQ ID NO: 3196 - DNA, 149 bp, Protomyxzoa rheumatica
ccccattacactccactacactctgttccacttcactccgctccattccaattcactccattccgttccactccattcaattccattccattccactccactcgactccattccattccagtccactccattctattccattccattcc

SEQ ID NO: 3197 - DNA, 189 bp, Protomyxzoa rheumatica
gaatggaatcaacttgattggaatggaatggaatggaatgcaacggaatggaatcaacccgactgcatgggaatggaatggaatggaatgcaatggaaaggaatcatgcgcaacggaatggaatggaatggaatggaatgaactcgattgcaacggaatggaatggaatggaatggaatggaatggaat

SEQ ID NO: 3198 - DNA, 219 bp, Protomyxzoa rheumatica
ccattccatttgattccattccattcgattccattccatttaatttgattccactccatatgattccattccatttgatcccttttcatttgatttcattccattctattctgttacattcaattctgttacattccattccattcctttggattccattccattccattcctttccagtccattcctttccagtccattccaatcgattccattcaat

SEQ ID NO: 3199 - DNA, 141 bp, Protomyxzoa rheumatica
attccattccattgcattccattccattccattccattctattccgttcctttccattccattccattccattccattccactcgggttcattccgttctgttccattccattgcattccgttccattccattccattcca

SEQ ID NO: 3200 - DNA, 129 bp, Protomyxzoa rheumatica
tggaatggaatggaatgaaatcaactcgagtggaatggaacggaatggaatggcatggaaaggaaggaatggaatggaatggaatgaaatggaaagcatcggaatggaatccaatggaatcaactggaa

SEQ ID NO: 3201 - DNA, 171 bp, Protomyxzoa rheumatica
ccattccattccattccattccattccattccattcttgtccattccattccacttcattccattcgactccattccattcttttccattcgggtccattccactccattccattcgagtccattgcattctatttcattccattcgagtccattcctttctattccattc

SEQ ID NO: 3202 - DNA, 144 bp, Protomyxzoa rheumatica
ccattccattcctttccgttccattccattccattccaatccattatattcctgttaattccattccattctattccattccattccattgaaatcgagttgattccatcccattccattccattccattccattccattccat

SEQ ID NO: 3203 - DNA, 208 bp, Protomyxzoa rheumatica
atggaaaggaatggaatgaagtcaactcgagtggaatggaatggaatggaatggattggattggattgcaatggaatgaaatggaatggaatggaatggaatcaatcatgcaagggaatgtaatggagtggaaaggagggaatggaatcaacccgagtggaatgcaaggcaaaggaatggaatggaaaggaatggaatggaatcaact

SEQ ID NO: 3204 - DNA, 128 bp, Protomyxzoa rheumatica
ttccattctattcggtaccattccattccattccattccattccataccatgccattccacttgggttgattcccttcctttccattccattcggtttgaatcctttccattccattccattccattc

SEQ ID NO: 3205 - DNA, 131 bp, Protomyxzoa rheumatica
tccattccattcgattccattcccttccattgcattctacacgtgattattccattccattccattccattccggtccattccactcaattccagtctggttgtttccattccattccattccattccatt

SEQ ID NO: 3206 - DNA, 165 bp, Protomyxzoa rheumatica
attccattatggaatgcagtgcagtggaatggtgtggagagcagttgaatggagtggagtataatggaacggaatggagtggagtggaatggaatggaatggaaagaatggaatggaaaggaattgagtggagtggaatggggtggagtggagtggaatggagtg

SEQ ID NO: 3207 - DNA, 241 bp, Protomyxzoa rheumatica
gagatcctgtcgaaagaaaatattggaatggaatggagtggaatggaatgcaatgtattggattggagaggaaaggagtggcatggaattggatggtatgaaatggattggatcggagaagagtggaatggaatagagtggagtcgagtggaaaggagtggaggagaatggagtggaattgaatggaatgtaatggaatgcaatggaatggtgaaaagaaatgtgtgctgatattgtgcca

SEQ ID NO: 3208 - DNA, 81 bp, Protomyxzoa rheumatica
gaatggaatggaatggaatgcaatggaatcaactcgattgaaatgggatggaatggaatggactggaatggaagggaatgg

SEQ ID NO: 3209 - DNA, 291 bp, Protomyxzoa rheumatica
tccattccatcccattccattccattccattccattccatcccattgcattcgattccattccattccatgccattacactcgggttgattccactcctttccattccattcttgttgaatccattccattccattccattatattcgaatccattccattccattcgaatccattccattgcactcggtttgatccattccattccattccattccatttcattccattcccttccattccattccatttcattcggattgattcttttcaactcccttactctccatta

SEQ ID NO: 3210 - DNA, 148 bp, Protomyxzoa rheumatica
agggaagggaatggaatggaaaagaatagaatggaaacaaccaaagtggaatggaatggaatagaatggaatggaatggaatcaactcgagtggaatgggatggattggaatggattgaaatggaatggaatgcaatggaatggaatg

SEQ ID NO: 3211 - DNA, 81 bp, Protomyxzoa rheumatica
acggaatggaatggaatggacagtaatgaatggaatggaatggtatggtgtggaatcaacacgagaggaatggaatggaat

SEQ ID NO: 3212 - DNA, 97 bp, Protomyxzoa rheumatica
ttgattcagttctattccattacattaaattccattccacttggtttgattcaattccattctattccattccatcgcactccattccattccattc

SEQ ID NO: 3213 - DNA, 227 bp, Protomyxzoa rheumatica
aatggaatggaatggaatgcaatggaatccacccgagtggcatggaatggagtggaacggaatggaatagaatggaatggaatggagtggaatggaacggaatggagtggaatggaataaacaacaggggaatgaattggattggaaataaatggaatggaatggaatggaatgaaatcaaaccgagtggaatgcaacggaatggaatggaatggaaaggaatgaat

SEQ ID NO: 3214 - DNA, 147 bp, Protomyxzoa rheumatica
agagtgagatcctatcgaaggaaaggaatggaaaggaatgcagtggaatggaatggaaaggattggagtggagtggagtggagtggaatggagaggaatcgaaagggatggaatgaaacggaatgaagtggagtagagtagagagct

SEQ ID NO: 3215 - DNA, 180 bp, Protomyxzoa rheumatica
ccattccattccattccataccattccattccattccatttcaatctatacgattccatcccactcgggttgattccactacattccattcttttccattatattccactctggtggattccattcaattcctatccattccattccattccactcgtgttgatcccattcaatgccatt

SEQ ID NO: 3216 - DNA, 132 bp, Protomyxzoa rheumatica
ccattcaattccattccattcgagtacattccattccattacattctattccattcgagtccattccatttcattccacttgagtccattccgttccattccttttgagtcctttccattccattccattcc

SEQ ID NO: 3217 - DNA, 156 bp, Protomyxzoa rheumatica
gaattaccccgagtgaaatggcatggaaaggaacggaatataatttaatggaatagaatggaatggaatggaatcaacccgagtgtaactgaatggaatgtaatggaatgcaatgtaatggaatggaaccaataagagtggaatggattggaatgg

SEQ ID NO: 3218 - DNA, 160 bp, Protomyxzoa rheumatica
aatggaatgcaaaggaatggaatggaataatatggaatggaatggaatggaatggaatggtatcaactcgagtggaatggaatggaatggagtggattggaatggaatgcaatggaatgaaatggaatcattccgagtctaatggaagggaatgtaatcg

SEQ ID NO: 3219 - DNA, 140 bp, Protomyxzoa rheumatica
tccattccattccattccattccattccattccattccttcacattccattccattccattccatttgggttgattcttttcaattcctttacagtctcttccattccattccattccacacaattccattccattccat

SEQ ID NO: 3220 - DNA, 151 bp, Protomyxzoa rheumatica
aatggaatggaatggaatgggatggaatggaatggaatgggatggaatggattggaatcaaaccgagtggaatggaatggaatgcaatggaacggaaaggaatgcaattgaatgaaataaacccgaatggaatggaatggaatggaataga

SEQ ID NO: 3221 - DNA, 182 bp, Protomyxzoa rheumatica
cattccattccattccattccattcctttcgagtccattcagttccattccataacatttgagtccattccattccattacattccattgcattaaattcgagtccattccattccatttcattcgagtccctttcattccgttccattcaattcgagtccattccttaccattacattccg

SEQ ID NO: 3222 - DNA, 132 bp, Protomyxzoa rheumatica
cactcgggttgattccattcaattctattccattcccttccattccaattgagcagtttcaattccattctataccactccattccatttcattgaattccattccattccattctattccactctgggtga

SEQ ID NO: 3223 - DNA, 163 bp, Protomyxzoa rheumatica
agtggaatggaatggaatggaatggaatagaatggaaaggggtggaggggaatgcaatggagtggagtggaatggaatggaatggaatcaaatgaaatggaatagaaaagaatagaatcaaagggaatggaatcgaatggaatggaatagaatgaaatggaat

SEQ ID NO: 3224 - DNA, 159 bp, Protomyxzoa rheumatica
caatggaatggaatggaatcaactggaaaggaatcaaatggaacggaatggaatagaatggaatggattggaatggaaaggaatggattcaacccgagtggaatggaatggaatagaacggaataaacacgagtggaatggaatggaatggaatggaat

SEQ ID NO: 3225 - DNA, 154 bp, Protomyxzoa rheumatica
attccgttccattccattcgtgttgattaacttcctttcctttcaattccatcccattccattccattccgtttcattccattcgtgttgatcccattccattcctttccattccattccattctattacactccattccattccattcctttc

SEQ ID NO: 3226 - DNA, 276 bp, Protomyxzoa rheumatica
ggaatggaatggaatggaatggaatggaatggaatgaacccgagtgcaatcgaatggagtggaatggaatggaatggaatggaaacaacacgaatggaatggaatgtaatggagcgtaagtgaattgaatggaatcaatccgaaagtaatggaatggaattgaacagaatggaatggaatggaacggaatggaatgcaatggaatggaatcaacacgagtgcaattgaatggaatcgaatggaatggaatggaatggaatgaattcaacccgaatg

SEQ ID NO: 3227 - DNA, 96 bp, Protomyxzoa rheumatica
acatctcaaaggagtttctgagaaggcttctttctagtttctaggtgaacatattcctttttccaccacaggcaacaaagctctccaaatgaacac

SEQ ID NO: 3228 - DNA, 177 bp, Protomyxzoa rheumatica
ccattccattccatgccattccattccatttcacacgggttgattcaattccattgtgttccattcaattccattctattccattccattccaatccattccattccgttccactctggatgattccattccgttctatttcatttcattccattccattccattccattccattcc

SEQ ID NO: 3229 - DNA, 130 bp, Protomyxzoa rheumatica
ggactggaatgcaacggtctcaaatggaatcgaatcaaatggaatggaatcgaacggaatggaatcaaaaggaatggaatgaactgtaatggaatggaatggactggaatgcaatggattggaacagaat

SEQ ID NO: 3230 - DNA, 150 bp, Protomyxzoa rheumatica
agaatggaatggaatggaatggaacggaatggaatggaatgcaatataatagaatcaatccgagtgcagggggatggaatggaatttaatgcaatggaatggaatcaaccggaacggaatggaatggaatggaatggaatggaaaggaat

SEQ ID NO: 3231 - DNA, 218 bp, Protomyxzoa rheumatica
tggaatggaatggaatggaatggactcgaagagaatggaatggaatggaattgaatggaatggaatcgaaaggaatgctattgaatagaatgcaacgaaatggaatggaatggaatgcattcgaatggaatggaatagcatggaatggaatggaatggactcgaacagaatggaatggatggaatggaatgtaatggaatggaatgcaatgaaatgga

SEQ ID NO: 3232 - DNA, 163 bp, Protomyxzoa rheumatica
tggaatggaatggaatggaaattaatggaatggaatggaaacaacccaaggagaatggaatgcaatggaatggaatggaatggaatcgaatggaattcactggaacggaatggactggaattcaatggactcgaatggaatggactcgaatggaatggatttg

SEQ ID NO: 3233 - DNA, 131 bp, Protomyxzoa rheumatica
ccattctgttccattccattccattccattccaatggagtccattccattccactgcattcttctccattccactccaatccactccactctactgcactccactccacaccattccattccattccattc

SEQ ID NO: 3234 - DNA, 195 bp, Protomyxzoa rheumatica
ccctccattccattccattccacaggggttgattcaattcgtatctgttccattccagtcctttccattcaattccattccattccattcgattccactccattcatttcctttccattccattccattccattccatcccatcccattctgttccactcggggttgattcaaatccattctattccattccatt

SEQ ID NO: 3235 - DNA, 366 bp, Protomyxzoa rheumatica
ccattccaatccattccactcttattggttccattccattgcattgtattccattccattccattccattccactcgggttgattccattgcattcctttccattccattccattgcattccactcgcgatgattcaattacattctagtacattccattccattccattccatttcattcctctcaggttgattgaaatctttctattccattccattccattccatttcattccattccactcgggttgtttcaattccattctaatccattccattgcattccattccattccattccattcgtgttgatttaattcctttctattccattccattccatttcattccattccattccattcc

SEQ ID NO: 3236 - DNA, 137 bp, Protomyxzoa rheumatica
atggaatggaatgccttcaaaccgaatggaatcgaaaggaatggaatcaacacgagtggaaaggaatggaatggaaaggaatggaaaggaatggaatggtacggaatagaacggaatggaacgaactggaatggaat

SEQ ID NO: 3237 - DNA, 219 bp, Protomyxzoa rheumatica
attccattccgttccattccattccgttccattccattccattccattctgttcgggttaattccattctattcctttcccttccattccattccattccatcccattgcaatcgagttcattccattgcattccattccattacattccattgcattccattccattccattcccttgcactcaggttgattccattcgattcctttccattccattc

SEQ ID NO: 3238 - DNA, 85 bp, Protomyxzoa rheumatica
cattccattccattccattccattccattccatgtcattctattccattcttgttgattccattccattcgaatgcattccattc

SEQ ID NO: 3239 - DNA, 197 bp, Protomyxzoa rheumatica
attgaatggaatggaatggaatggaatgaaatggattggaatcaacccgcgtggaatgtagtggattcgaatggaatggaatcaacccgataggaatgcaatgaaatggaatggaatgcaatggaattgaacggaaaggaatggagtcaaccctactggaatggaagagaatttaaaggaaaggaacggaatggaat

SEQ ID NO: 3240 - DNA, 141 bp, Protomyxzoa rheumatica
ttgaatggaatgcaatggaatggaatggaacagaattgaattgaattaacatgagtggaatggaagtgagtggaatggaatggaatggaatgacacggaatggcatggaatggaatggaatggaatggaatggaatggaat

SEQ ID NO: 3241 - DNA, 201 bp, Protomyxzoa rheumatica
gagtagagtggagtggagtgtaatggggtggcgtggagtggagtggaatgtaatggagtttaatggaatggaatgaagtggagtggagtgcagtggaattgaatggagtggagtggaatggaatggtgaaatgaaatgtgagctaagatttcgccactgcactctggtctgtgtgacagtgtgagatccattcgaaataaa

SEQ ID NO: 3242 - DNA, 154 bp, Protomyxzoa rheumatica
gaatggaattgaatggagtggagtggagtggaatggaatgcaatggaatagaatgtaaaggaatggaatggaatcgaatggaatggaattgagggaaatggagtggaaagtagtgcaacggaatggagtggagtgggatgggatggagtgtagt

SEQ ID NO: 3243 - DNA, 141 bp, Protomyxzoa rheumatica
ctattcgattccattcgatgatgattccattcatttccattccatgatgattccattcgattccgttcgatgattactccattcgagtccattccatgattccattcgattccattcgatgatgattgcattcgagtccat

SEQ ID NO: 3244 - DNA, 129 bp, Protomyxzoa rheumatica
aaatatatatttgatgtaatttcatcttttatgtacagtatataatacttgctttgtgtactttcatattttatgtacattatataatatatatttcgtaaattttgatatttcatgtacactgtataa

SEQ ID NO: 3245 - DNA, 158 bp, Protomyxzoa rheumatica
attccacgcgatttgattccattccattctattccgtttctgtccattccacgccatacgattccattgcattccattccattcgggtacattccattccattccattccattatataccatttcattctgttagattccattccattccattccatt

SEQ ID NO: 3246 - DNA, 122 bp, Protomyxzoa rheumatica
gaacgaaatggaatggaatggattcaacccaattggaaaggaaaggtatggaatgcaatggaatggaatgaacccgagtggaatggcacgttatggaatggaatggaatggaatggaatgga

SEQ ID NO: 3247 - DNA, 150 bp, Protomyxzoa rheumatica
tccattccattcctttccattcctgttgattcccttccattccattccattccattgcatttcgttgcattcaattccattccattctattccattccactcgggttgagtccattcctttccattccattcgggttgaatccaatccac

SEQ ID NO: 3248 - DNA, 184 bp, Protomyxzoa rheumatica
ccattccattccattccattccagttgattcaattccattgaattccattccattctattccattccattaaattccgttccattccattgcattccattccattacgccatgccactcaggttgattcaattccattctattcgattccattctattccattccattccattgcattccattc

SEQ ID NO: 3249 - DNA, 189 bp, Protomyxzoa rheumatica
cattccattccattccattccattccatttcattccattcgattctaatccgtaccattcaattccattccattccatgccattccattccattccagtccatgccattccactcgggttgatttcattcctttccattccattcgagttgtatcctttgcattccattccattccattcgattccatt

SEQ ID NO: 3250 - DNA, 152 bp, Protomyxzoa rheumatica
ggtgacagagtgagatcctgtcaaaggaaaggaatggaatggaatggagtgtaatggaatggaacggagtgaagtggagtggagtggagtggaatggaataggatggagtggagagcagtgtagtggagtggagtgtaatggaatggagtgg

SEQ ID NO: 3251 - DNA, 208 bp, Protomyxzoa rheumatica
gaatgtaatggaatggaatggaacggaatggaatggaatgcaatggaatggaaagaagggaatggaatcaacccgagttgattccattgctttgcattccgttccattccattccttttcattgtattcgggttaattccattgcattccattccattcctttccattccattccattccattacaatggagttgattccattccatt

SEQ ID NO: 3252 - DNA, 142 bp, Protomyxzoa rheumatica
ccattccattcttttctgatccattcaatttagatgcattcccttccgttccattccattcaattccattccattccattcttttcctttacactcgagtttattccattccattctattgcattccattccattccattct

SEQ ID NO: 3253 - DNA, 234 bp, Protomyxzoa rheumatica
tcgaatccattccattccattcctttccacttgggttgattccgttccattgcattccattcgattcctttccattccacttggtttgattcctttccattccatttcattccattccactcaggttgattccattccatccattccattaaattccattctattccattccactccattctattccattccactccattccattccattgcagtccggttgattccatgccat

SEQ ID NO: 3254 - DNA, 123 bp, Protomyxzoa rheumatica
ccactccactcgactccattgcattccgttccactccactccactctaatccactccactctattccattccgttccattccgttccatgacattccactccactccattacattccattaca

SEQ ID NO: 3255 - DNA, 155 bp, Protomyxzoa rheumatica
tggaatggaatggaatggaagagaatcaaagggaatgtaatgaactcgaatgaaatgcaattgaatggactcgaatggaatggaaaggactcgaatggaatagaatggactcaaatggaatggaatgtaaaggaatgaaatggaatggaatggcc

SEQ ID NO: 3256 - DNA, 125 bp, Protomyxzoa rheumatica
ccattgcattccattccattccattcccctaccctcgggttcattacattccattccatttacttccattccattccattccatcccattccattctattcgggttaattccattccattccatt

SEQ ID NO: 3257 - DNA, 163 bp, Protomyxzoa rheumatica
tattcctttcctttccgttccattccattccattccattgtactcgggttgattcaattccattccattccgtcgcattccattccattccattccattccattcgtcttgatgcaaatccattctatttcatttcactacattccattccaatccattccat

SEQ ID NO: 3258 - DNA, 122 bp, Protomyxzoa rheumatica
ggaatggaaaggaatggaatggattcgaatggaatggaatggaatagaattatatgcaatagaatggaatggaatggaatcaacacgaatttaatggaatggaatggaaaggaatctaatag

SEQ ID NO: 3259 - DNA, 134 bp, Protomyxzoa rheumatica
aaggaatggaatggaatggaatggaatctgcacgaatggaatggaatggaatcgaatgtaatggtatggaatggaatggaatctacccgaaaggaatgcaatggaatggaaaggaatggaatctacccgaatgg

SEQ ID NO: 3260 - DNA, 279 bp, Protomyxzoa rheumatica
ccattccattccactcgggttgattcaattccattctattgcatttcactacattccattccatttcattctgttctattccattcgggttgattccattcctttccattccattccattcctttcctttccattcaattccattgcacttgggttgattcaattccattctattccactccattccactccataccattccattccactccttacgtgttgtttcaattccatacttttccattccattctattccattccattccattccattccat

SEQ ID NO: 3261 - DNA, 134 bp, Protomyxzoa rheumatica
atggagtggagaggagtgaagtggaatgtaatggaatggaatccagaggattggaatggaatggaatggaatggaatgtactccaatggaatggactcaaatggaatgaaatcgaatagaatgctatcgaattg

SEQ ID NO: 3262 - DNA, 125 bp, Protomyxzoa rheumatica
tccattccattccgttccattccattccattccattccacagcactccgatccactccactgcactccagtccactccactccattccattacactccatttcattacattccacttccctccat

SEQ ID NO: 3263 - DNA, 150 bp, Protomyxzoa rheumatica
attccattccattccattccattccattccagttgattccatttgattccattccgatccactgcattccattccattccattccattccagtttaatccattggattatattccgatccaatccatttcattccattccattccattcc

SEQ ID NO: 3264 - DNA, 153 bp, Protomyxzoa rheumatica
ccactcgggtggattccattgcattccattccattccattgcacttagggagattccattccattccattccattccattgcattccgttccatttcatgccttcccattcaggtttattccattccattccattccattccattccattcca

SEQ ID NO: 3265 - DNA, 81 bp, Protomyxzoa rheumatica
aatgacttatttatttatcatgagtttataaatttaatttttacttaatgacttatttatttatcatgaggttataaattt

SEQ ID NO: 3266 - DNA, 358 bp, Protomyxzoa rheumatica
ttccattccattccattccactcatgttgattcaattccattccactccattccgttccatttcatttcaatcctttccattacattaaattccattccattccattctattccactcgggttgattcaatttcattctattccattgcattccattctattccattccattccctggggtttattccattcctatccattcgattccattccattccactccattccattccaatccattccattctacttgtgtggattcaattccattctattccattcaattcctttccattccattacactcgtgtttattcaattctattctattccattccataccattccattccattcc

SEQ ID NO: 3267 - DNA, 133 bp, Protomyxzoa rheumatica
tccagtccattccattccagttcattccattccactccagtccactctactccactccactctactccactccactcaactccactgcactccactcaactccattctgttccgttccattcctttcctttcc

SEQ ID NO: 3268 - DNA, 137 bp, Protomyxzoa rheumatica
aatccactccactccaccccaatccattccactctattccattctactccactccattccactcaaccctattccactactgtccattccactccactccattgcactccactccactccattcaactccactacat

SEQ ID NO: 3269 - DNA, 126 bp, Protomyxzoa rheumatica
tacagtataaaatatatatttggggtactttggtgtttaaagtacagtatataatctatatttgatgtgctttcatattttgtacctaatatagatttgatataatttcatattttatgtacagta

SEQ ID NO: 3270 - DNA, 130 bp, Protomyxzoa rheumatica
attccattccattccattccattccattccattccactcgattctgctccattccattgcattccacccgccttcattcaattctattctattccattcctttccattccattccattacactcggtttg

SEQ ID NO: 3271 - DNA, 140 bp, Protomyxzoa rheumatica
atggaatggaatggaatcaacccgagcggaaaggaatggattggaatggagtggaatggaatctaatgtaatgtaatggaatggaatggaatcaacacaaatggaatagaatggaatggaatgggatgggatgggatgga

SEQ ID NO: 3272 - DNA, 151 bp, Protomyxzoa rheumatica
attgcacacgggttgattccattccattcctttctgttccattccggatgactcaattccattgcattccattccattccattcccctgccctctggttcattataatccattccatttacttccaatccattccattccattcaattcca

SEQ ID NO: 3273 - DNA, 130 bp, Protomyxzoa rheumatica
ttaatggaatgaattctaatagaatggaaaggaatggactcgaatggaatagaattgaatggactcaaatggaatggaacgcaatggaaaggactcgaaaggaatggaatgcaatggacttgaatggaat

SEQ ID NO: 3274 - DNA, 172 bp, Protomyxzoa rheumatica
atcgagttgattccattccattccattccattcaattccattccattccattcgtttccattccaatacggatgactccattccattgcattccattccattgcattcccctgtactcggattgattccattccattccattccactccattcggttccgttgcattccatt

SEQ ID NO: 3275 - DNA, 162 bp, Protomyxzoa rheumatica
ccattccattccattccattctgttccattccattccactccattccagtccactctactccactccactccattccattgaatcccattctattccactccattccactccactccactccaatccactctactccactccattccattccattccattcc

SEQ ID NO: 3276 - DNA, 124 bp, Protomyxzoa rheumatica
attccattgcaatcgagttgattccattccattccattccgttccgttccggatgattccattccattgcgttccattacattccattcccgtgcagtcgggttgattccattccattccattc

SEQ ID NO: 3277 - DNA, 172 bp, Protomyxzoa rheumatica
aggttgattccattccattccattccattaaattccattctgttcctttccattccatttcactcgggttaattccattccattccataccgttccattccattccattccattcaggttgtttccattccattccattcaattccactcgggttaattccattccattcca

SEQ ID NO: 3278 - DNA, 128 bp, Protomyxzoa rheumatica
tggaattaaatggaatcagcattgaatgaaatcaaatggaatcaccatcgaatagaattgaatggaatcattgaatggaatcatcatcaaatggattccaatggaatcatcaaatggactcgaatgga

SEQ ID NO: 3279 - DNA, 142 bp, Protomyxzoa rheumatica
gtggaatggaatggaatgtaatcatctggaattcaatgcaatggataggattggaatggaatggaatggaatggtatcaacgcgaaaggaatggaatggaaaggaatggaatgtaatgtaatgtaatggaatggaatggaat

SEQ ID NO: 3280 - DNA, 143 bp, Protomyxzoa rheumatica
atggaagggaatgtaatcgagtggaatggaatggaatggaatcaactcgagtggaatggaagggaagggaatggaatagaaaggaatggaatggaatcaaccagagtgtaatggaatggaatggaatggaatggaatggaatg

SEQ ID NO: 3281 - DNA, 161 bp, Protomyxzoa rheumatica
gattctattcctcttcatttcattcaattccattccattccactccactccagtccattccattacactccattccattccattccatttctttctattccattccactcgattccattccattccgttccattccactccactctgttccattccattcc

SEQ ID NO: 3282 - DNA, 136 bp, Protomyxzoa rheumatica
gagtggaatggagtggagtggaatggagtggaacggaatgaaatggaatagagaggaatggaatggaatagaatggaatgacgaggaatatagtataatggagtggagtggagtggaatggagtttagtggaatgg

SEQ ID NO: 3283 - DNA, 149 bp, Protomyxzoa rheumatica
atggaatggaatggaatggagtggaatggaatggagtggagtggagtagagtggattggtgtggagtgtaatggaatagaatggaatggaaaggaaaggaatggaatagaatggaatgatgaaatgaaatatgagctgagattgtgcca

SEQ ID NO: 3284 - DNA, 199 bp, Protomyxzoa rheumatica
tccattccattctattccattccattctattcgcggtaattccattccattccattccattaccttccattgcaatcgagttgattccattccattccgttcctttccattccattccattcaagtcctttccattccattccagtcgtgttgattccattttattagtttccattccattccattcccttccattcca

SEQ ID NO: 3285 - DNA, 186 bp, Protomyxzoa rheumatica
atggaatggaatggaatcaactcgaatggaatggaatggaatggaatggagtggaatggactggaacgaaatggaatagaatggaatggaatacaatggaatggattgaaatggaatggaaaggaataaaatcaagtgaaattggatggaatggattggaatggaatggaatggaatggaatggaa

SEQ ID NO: 3286 - DNA, 391 bp, Protomyxzoa rheumatica
gaatcaaatggaatggaattgaatggaaatgaaagtaatagaattcaatggagtgtaatggaataatatggaatggagtgtaatggaatgcaggggacacaaatggaatggactggaatggaatggacacgaatggaatgcactggagtggaatggacacgaatggaatggaatgaaatggaatggaatggaatgaaatggaatggaaagcaatagaatggaatggaatcagttggagtagaatggaatggaatggagcttaatggaattgaatggagactaatggaatagaatcaaatggaatggactcgaatggaatgtgctcgaatggaatggaatcgaatagattgatatcaactggaatggaatggaagagaatggaatggaatgg

SEQ ID NO: 3287 - DNA, 147 bp, Protomyxzoa rheumatica
ccattccactccattcccttccattccattccattccattttattcgggtgaattccattccattccattccattccattccattaaattccattgcaatcgagttgattccattccattccattccattccgttccattccattcc

SEQ ID NO: 3288 - DNA, 135 bp, Protomyxzoa rheumatica
ccaaggaaatggaatggaatggaatggaattgaaaggaatggactcaaatagaatggactcgaatggaatgcaccagaatggaatggactggaatggaatggaatgcactcgaatggaatgtaatcaaactggaa

SEQ ID NO: 3289 - DNA, 149 bp, Protomyxzoa rheumatica
aacgtaatggaatggtaaggaatgtaattgaatgaatggaatcaaaacgaggggaatagaatggaatggaatggaatggaatgggaatgaatggaatggactcaaatggaatggaatggaatggaattgaattgagtggaatggaatgg

SEQ ID NO: 3290 - DNA, 133 bp, Protomyxzoa rheumatica
gagtggaatggaatggaatggagtagagtggagtggagtagaatggattagagtggagtgtaatggaatggagtggaatggaacagagggtagtggaatgaaatggaatggagtggagtagagtggagtggag

SEQ ID NO: 3291 - DNA, 145 bp, Protomyxzoa rheumatica
ggaacttaatggaatggtatgcactggaatttaatcatccggaatggaacggaatggaatggaatggtatggaatggaatgaaatggaatggaatcaactcgatttcaatggaaaggaatggaatggaatggaatggaatggaat

SEQ ID NO: 3292 - DNA, 145 bp, Protomyxzoa rheumatica
aatcaactggaatggaatgcagtggaatggaatggaatcaacaccagtggaatggaatggaatggaatggataataatagaatggaatggaataaatccggctgaaatggaatggaatggaatgcaatggaatgaaatggaatca

SEQ ID NO: 3293 - DNA, 129 bp, Protomyxzoa rheumatica
tgggggggaatggaatcgaacagagtgccacgcaatggaatggaatggaatggaggggagtagaatggaatggaatagaatggaatggattggaatagagtggaaaggaatggaatggaatggagtgga

SEQ ID NO: 3294 - DNA, 159 bp, Protomyxzoa rheumatica
atggaatggaatggaacggaatggaatggaatggaatggactggaatcaacccgggtgcaggggaatgcaatggaatggaaggcaatggaatggagtcatccggaattgaatggaatggaatggaatggaatggaatctactcgattgcattggaatgg

SEQ ID NO: 3295 - DNA, 132 bp, Protomyxzoa rheumatica
gaatgtaatgtaatggaatggggtggaatggaattgattggaatggaatgtagtggagtggagtggagtggggtcgagtggatgggaatagaatggaatggaattgattggaattgaaacgaggggattgga

SEQ ID NO: 3296 - DNA, 179 bp, Protomyxzoa rheumatica
gaatggaaaggaatggaatggaatgaaatcaacccgagtgaaatggaatggaatggagtgggatggaatagaatggaatggagtggattggaatcaatctgagtggaatggaaaggaatggaaaggaatgtaattgaagagaatggaatggaatggaatggaatagaatggaatggaat

SEQ ID NO: 3297 - DNA, 87 bp, Protomyxzoa rheumatica
cgactcgaatggattggaatcaaatataatagaatgtaatttaatggaatggaaaggaatggaatcaaatggaatgaactcgaatgg

SEQ ID NO: 3298 - DNA, 132 bp, Protomyxzoa rheumatica
ttattggttccattccattgcattgcattccatttcattccattccattccactcatgttgattccattccattccatttcattccattaatttctattccattcctttccatgccatttcactcggggtaa

SEQ ID NO: 3299 - DNA, 150 bp, Protomyxzoa rheumatica
tccattcccctccactccactctgttccattccattcaattcccctcgaatccattccattcctttccactccactccactccactcatttcaattccactcaattccattcaacaccattccattccactccactccacaccgttccat

SEQ ID NO: 3300 - DNA, 170 bp, Protomyxzoa rheumatica
aatctagtggagtggagttgagtggagttgattggagtgcagtggaattcaatggcatggactggaatggaatagagtggagtggagtggagtggaaagaagtggaatagagtggaatgaaatggagtggagtggaatggtatggaatagaatggaatggaatggaatgg

SEQ ID NO: 3301 - DNA, 135 bp, Protomyxzoa rheumatica
cattccgttccatttcattccattccattccacaggagttgattccattccgttccaatccatttcattccactccactccactcgattccattccattccattccatttgggtagtttccattccattccattc

SEQ ID NO: 3302 - DNA, 128 bp, Protomyxzoa rheumatica
gaatggaatgtaatcaaactggaatgcaatctaatgggatggaatctaatagaatggaataaaatggaatggaaaaaaatggaatggaatcgaatggaatggaattgattagcattgagtggaatcga

SEQ ID NO: 3303 - DNA, 131 bp, Protomyxzoa rheumatica
gatgattccattccattgcattctgttccattacattcccctgcactcgcattgattccattccattccattcaatgccattccattacaattcgttacattccattctattccgtaccattccattccat

SEQ ID NO: 3304 - DNA, 177 bp, Protomyxzoa rheumatica
tccattccattccattccattccactccattgcattccattccattacattctgtcccattccattgcattgcattccattccattccacttccatccattgcatttcactcgaattcacccagtctcattccattcctttccatcccattcatttcccttcctttccattccatta

SEQ ID NO: 3305 - DNA, 124 bp, Protomyxzoa rheumatica
tggaatcaaccagagtggagtggagtggaatgcaatcgaatggaatggaatggaaagcaatgaaatggaatttaatagaatggattggaatataatggaatggaatcaaacctagtgcaatgga

SEQ ID NO: 3306 - DNA, 130 bp, Protomyxzoa rheumatica
catttcattccattccattccattccactcgtgttgattaaattccgttctattctattccattccatttcattcttttccattccattgcattccactcgagttgattcaattccattctattccattc

SEQ ID NO: 3307 - DNA, 129 bp, Protomyxzoa rheumatica
ccattccattgcattccattccattccattccattccattactttccattccattcctttcctttccactcgggttgattccattccattccattatattccattacattactttccattccactaaat

SEQ ID NO: 3308 - DNA, 122 bp, Protomyxzoa rheumatica
tatatacatatatgtgtgtatatacatatatgtgtatatacatatgtgtatatgtgtatatacatatatgtgtgtatatgtgtatatacatatatgtgtatatgtgtatatacatgtatgtg

SEQ ID NO: 3309 - DNA, 139 bp, Protomyxzoa rheumatica
ggaattgaatcaacacaagtggaatggaatggaatggaattgcaaagaatggaatggaatggaatggaatgaaatagaatggaattgaaacaaccggagggaatggattggaatggaatgcaatggaatggaatggaat

SEQ ID NO: 3310 - DNA, 151 bp, Protomyxzoa rheumatica
gatttgattccattccattctattccgtttaattccattccatgccatacgattccattccattccataccattcgggtacattccattccattccattccattctggtaaattccattccattccattccattcctttccattgcattcc

SEQ ID NO: 3311 - DNA, 130 bp, Protomyxzoa rheumatica
gaatggattggaatggaatggaatggaatggaatggaacgaataagagtggaatggaatggaatggaaacgaatggagtggaatggaatggaagcaacctgagtggaatggaatggataggaacggaagg

SEQ ID NO: 3312 - DNA, 157 bp, Protomyxzoa rheumatica
attccactccattgcattcccttccattccactcggagtcattccattccattccattgcattccattccaatccacttctttccattccattccactcgatttgatttcattccattccattccattccattcctttcaggttgattctattcaat

SEQ ID NO: 3313 - DNA, 125 bp, Protomyxzoa rheumatica
aggagtggagtggaatggaatcaaacggagtggagtggagtggaatgaaatggagtggaatagaatggaatggagtggaacggaattgaatgtaatggaatggaatggagtggagtggagtagaa

SEQ ID NO: 3314 - DNA, 162 bp, Protomyxzoa rheumatica
ccagccctttccattccattccattccactcggtttatttccattacattgaattccattccatgtcattccattgcattccattccactcggtttgtttcctttccatcccattccattagtttccattccattctattccattcattctattccattcca

SEQ ID NO: 3315 - DNA, 123 bp, Protomyxzoa rheumatica
tggagtggagtggaatgaagtgtattggtctggaaaggaattgaatggaatttagtggaatggaatggaacggagtggtgtggagtggagtggaatggagtagaatggagtgaaaaggagtgg

SEQ ID NO: 3316 - DNA, 176 bp, Protomyxzoa rheumatica
atggaatcaacccgaatgggatggcatggaatggaattgaatggaatggaatgggatggaatggaatggagtggaatcaacacaagtgcaatggaatagaatggaatgcaatggaatccacccgagtggaagggaatggaatgcaatggaatggaatggaatcgaaaggaatagaa

SEQ ID NO: 3317 - DNA, 146 bp, Protomyxzoa rheumatica
aatggaaaggatcggaggagagtagagtgcagtggaatggagtggaatggaatgggatggaatggagaggagaggagaaaagtgtagtggagtcgaatggaatggagtggagtggagttgagtggactggaatggaatggagtgga

SEQ ID NO: 3318 - DNA, 156 bp, Protomyxzoa rheumatica
ctattcgattccattcgatgatgattccattcatttccatcggatgatgattccattcgattccgtttgatgattattccattcgagtccattcgatgattccattccatgccattcgatgattattgcattcgagtccatggattattccattcc

SEQ ID NO: 3319 - DNA, 149 bp, Protomyxzoa rheumatica
cgatggaatggacttgaatggaatgtaatggagtgaaacggaattgaatggaatggaagggagtggaatcgaatggaatggaatgtaaaagaaaggaatggaattgaatggaaggaatggacactaatggaatggaatggattgaaatg

SEQ ID NO: 3320 - DNA, 100 bp, Protomyxzoa rheumatica
tccattccattccattccattcctttccattaaattacgtatgattccattccagtttattccattccattccattccattcctttccattaaattacgt

SEQ ID NO: 3321 - DNA, 130 bp, Protomyxzoa rheumatica
ggttgattccattccattccattccattccactccattccgttcggttccattccattccattccattccattctattctggttaattccattccattacattcgattccattccattcccttccattcc

SEQ ID NO: 3322 - DNA, 145 bp, Protomyxzoa rheumatica
ccattctgttccatttcgttccattctgttccattccattgcaatccattccattccactccactccactacactccaatccatttccctccattccactccattccactccgctttactaaactgcattccattccactccatt

SEQ ID NO: 3323 - DNA, 167 bp, Protomyxzoa rheumatica
aaggaatggaatggagtggaatggaatggaatggagtggagtggagaggaatggagtggaatggaatgggatggaattgaataccatggagtgaggtggattggagtggagtagagtggaatggagtggagtggaatggaatggaatgcagtggaatgcaatggaat

SEQ ID NO: 3324 - DNA, 176 bp, Protomyxzoa rheumatica
tccattccattccaccacactccactccattccactcgactccattccattccactacattccactccactccacttccttcccctccactccactccattcctctcctctccactgcagtccactccattgtaatctactccattctattccacaccactcccttccattccttt

SEQ ID NO: 3325 - DNA, 122 bp, Protomyxzoa rheumatica
aaggaatggaatggaatcaacgtgactgaaatggaatggaatggaaaggaatgaatgcaatggaatggaatgggatggtatggaatgcaatgggatggaattgaatggaatggaacggaacg

SEQ ID NO: 3326 - DNA, 147 bp, Protomyxzoa rheumatica
ccactcaattccatagcattccattctattcgattgcattccttgccattccattccattttggtccattccattcaattccattcgagtcaattccattgcattcctttggagtccattccgttgtattccattccattactttgg

SEQ ID NO: 3327 - DNA, 191 bp, Protomyxzoa rheumatica
cattccattccattccattcgattccattccactggggttggttccattgcattccattccattccataccattccattccattccagttgatgcaaatactttctattcgattcaattccattccattccactccgttcccttccattctattccattccattgcattccattccattccagttgattca

SEQ ID NO: 3328 - DNA, 145 bp, Protomyxzoa rheumatica
ccattccattgcactcgggttgattccattccattccattctattcaattccattccactctggttgattccattccattcaattgctttccattccattccataacattccattgcattccattccattccattccattccatt

SEQ ID NO: 3329 - DNA, 132 bp, Protomyxzoa rheumatica
gcgattatcaagcagatgagcgggcaggtgtcacacggctcagctggcgattatcaagcagatgatcgggcaggtgtcgcgaggctcagctggcgattatcaagcagatgagcgggcaggtgtcacacggct

SEQ ID NO: 3330 - DNA, 156 bp, Protomyxzoa rheumatica
ctccactccaatccattcctctccaacccactccattccactccactccattccacccaattccattccactccactccattccattccaatctactccattgcattcaattcctttatttcgactggatctctctttatcacacacactggagta

SEQ ID NO: 3331 - DNA, 183 bp, Protomyxzoa rheumatica
gaatggaatggaattaacccgaatagaatggaatggaacgtaaaggaagggaatggaatgtaatcaactcgagtgcaggggaaagcaaagcaatggaatgaaatggaatggagtcatacggaatggaagggaatggaatggaatcaaccagagtgcaatggaatggagtggaatggaatggaa

SEQ ID NO: 3332 - DNA, 122 bp, Protomyxzoa rheumatica
attgcattccattccattccattccattccattccactcctatccagtcctttccattccattccattccattccaatcaatttgattccattgcattccattccattccattccattccat

SEQ ID NO: 3333 - DNA, 139 bp, Protomyxzoa rheumatica
tccattccattcgattccattcccttccattgcattctactcaggtttattccattccattccattccatttcgatccattacactcaattacactctggttgattccattgcattccattccattccattccattcca

SEQ ID NO: 3334 - DNA, 320 bp, Protomyxzoa rheumatica
gaatggaatggaatggaatggaatggaatcaactcgattgaaatggaatggattggaatggaatggagtggatgggaatggaatggaatgtaatgaacccgagtgcaggggaatagaatggaatggaatgcaatggaatggagtcatcctgaatggaacggaatggaatggaatggaatcaacccgtgtgcaatataatggaatcgaaaggaatggaatggaatggaatggattcaacccaaatggaatgaaaaggaatggaataaaccagagtggaatggcatggaatggagtggaatggaatggaatggaatggtaca

SEQ ID NO: 3335 - DNA, 180 bp, Protomyxzoa rheumatica
cccgagtggaatggaatggaatggaatagaatggaatggagtaaaacggaagagaatcaacccgattggaatggaatggaatggcattgaaaggaatggaatggaaaggaatggaatattatggaattgaaacaacacgtaaggaatggaatggaatagaatgtaaatgaatcaactcca

SEQ ID NO: 3336 - DNA, 86 bp, Protomyxzoa rheumatica
ttccattccattccattccatcctattccattccattccatgacactccactcgggttgattccattcctttccattccattcgag

SEQ ID NO: 3337 - DNA, 146 bp, Protomyxzoa rheumatica
agtccattctattccgttccattcctttccattccattcctttctatttgggcccagtccattcctttccattccattcgagtccattccatttcattccattccattccattactttcgtgtccattcaattgcatttcattcca

SEQ ID NO: 3338 - DNA, 123 bp, Protomyxzoa rheumatica
ccattccattgcattccactccattccactccactccaatcaactccactccactccacttcactccaatccactccactccattccattccatcccattccatttcactccattcctctcca

SEQ ID NO: 3339 - DNA, 202 bp, Protomyxzoa rheumatica
cactgaattcccttcctttccattccattccatttaattccactcgggatgattcatttccattgaattccattccattccattcctttcccctcgggttgattcaattccattctactccattcaattccattccatttcattccattccattcccctcgttttcattccattccattccattccattccattccattcca

SEQ ID NO: 3340 - DNA, 140 bp, Protomyxzoa rheumatica
ggaatggaatggaatggaagggaaaggaatggaatggaattaacctgaacagaacggattggaatggaatggaacggaatggaaaggaacggaatggaatggaatcaaccctagtgcaggggaatggaatggaatggaat

SEQ ID NO: 3341 - DNA, 86 bp, Protomyxzoa rheumatica
tccattccattccattccactctactccacaccactccactacactccattccattccaatccattccattccattccattccact

SEQ ID NO: 3342 - DNA, 156 bp, Protomyxzoa rheumatica
gaatggaatggaatggaatggaatggaatggaatcaacctgagtgcaggggataggaatggaatggaatgcaatggaatggaatgaaatggaatgcaatggaatcaattcgattgcaatggaatggaatggaatggaatggaagggaatggaatgg

SEQ ID NO: 3343 - DNA, 93 bp, Protomyxzoa rheumatica
ccattccatttctttccattccattcctttccattccattccaagcgtgttgcttccattccatttctttccattccattcctttccattcca

SEQ ID NO: 3344 - DNA, 170 bp, Protomyxzoa rheumatica
attccattccatccgattccattacattctttacatttcttatccatttcaagccattccattccattccattccattccactcgtttcctttccattcgactccattcctctccagtccattccgttcaatccatttcattccagtccattccattcgagtccgttcca

SEQ ID NO: 3345 - DNA, 408 bp, Protomyxzoa rheumatica
gcaatggaatggattggaatggaatgtagtgagatgaaatagactagaattgattcatgacgaatggaatggaatggaatcgaaaggaacggaatggaatggaatacaatggaattgaatcaaaccgaggacaatggaatggaatggaatggaatggaaaggaaaggaatagaatggaaaggaatggaatagagtggaatggaaaggaatggaatagaatggatttgaatcaaccctgagtgtaatggaatgtaatgttacggagttgaatgaaatggaatggtatacaatggaattgaatcaacccgagtggaaaggaatggaatggaatggaatagaatggaatggaatggattggaatggaacagaatagaatggaattgaatcaacccgagtggaatggaatgg

SEQ ID NO: 3346 - DNA, 91 bp, Protomyxzoa rheumatica
attccattccactccattccattccattccattccattcctctccatcactctccattccactccactccattccactccactccactcca

SEQ ID NO: 3347 - DNA, 137 bp, Protomyxzoa rheumatica
ttcctttccattccattccattcccttccattccactcggattgattccattcctttccattccactcgattactttcccttctattccactcggaatgattccgttccattccattccattccatttcgttccatt

SEQ ID NO: 3348 - DNA, 153 bp, Protomyxzoa rheumatica
tctatatgattccattccattcaagtccattacatttggttcaattccattccattccattcacttccattccattccagttgatatcaatccattcgattccattcccttcgagcacattccattcgagtccattccattcgatgccattcc

SEQ ID NO: 3349 - DNA, 124 bp, Protomyxzoa rheumatica
gaatggaatggattggaatggattgcaatggaatgaactggaatggaatggaatggaatcaatcatggaagggaatgtaatggagtggaaacaagggaatggaatcaacccgagtggaatgcaa

SEQ ID NO: 3350 - DNA, 108 bp, Protomyxzoa rheumatica
atggaatggaatggaatggaatggaatggaatcaacacgaatgggatggcatggaattgaattgaatcgaatggaatggaatggaatggaatggaatggattggaatg

SEQ ID NO: 3351 - DNA, 449 bp, Protomyxzoa rheumatica
gagttgaatggaatggggtgtaattgaattgaatggagtggagtggagtgaactggagtggaatggaatggaatgggcaggcatggaattgaaaggcgtggagtggagtggaattgagaggagtggaatggagtagggtggattgtagtggagagtattggaaaagagtggagtggaacggaatggaatggagtggagtggaatggaatggaattgagtgaagtggagtggagtggaatggagagtaatggagtggagtggacttgattggagtagatagcagtgcattggactgtacgggatagaaggggcttggagttccatggagtggagtggaatggaatggaatggagtggaatggattggaatggactggaaaggaatggaatggaatggatttaaatggcagggaatcaaatcgaattgaatcatattggaacaagttgaat

SEQ ID NO: 3352 - DNA, 81 bp, Protomyxzoa rheumatica
ggaatcaaatcgaattgaatcatattggaacaagttgaatcgactggaggaaagaaatcgaatgaaatcgaatggaatgaa

SEQ ID NO: 3353 - DNA, 98 bp, Protomyxzoa rheumatica
ttccattccattccatttcattccattccattccattccactttggttgataatatttcattccattccattccttttgattccattccattccactc

SEQ ID NO: 3354 - DNA, 167 bp, Protomyxzoa rheumatica
ggaatggaatgtaatgtaatggaatggaatggaatggaatggattggaatggacttgaataaaccggagtggaatttaatggaatggaatggaacggaatggaacggaatggaatggaatggaaagcaatggaatggaatggtatggaatggaatggaatggtacgg

SEQ ID NO: 3355 - DNA, 166 bp, Protomyxzoa rheumatica
attcctttccattccattctgtttgaagtcattccattccattcaattcctttccatttcattccattccattccattccattcctctccattccattgcacttggcttgattccattcatttcatttccattccattccattccattccattccattgtactcgg

SEQ ID NO: 3356 - DNA, 124 bp, Protomyxzoa rheumatica
acattccattacattcctttcctttccattcccttccatttcattccactgcattccattccattccattccattaaattccattcccttttattccacaagggagttgatttaattccattct

SEQ ID NO: 3357 - DNA, 123 bp, Protomyxzoa rheumatica
tggaatggaagggaatggaatggagtggaatggaacagaatggacttgaatggaatagaatggaatggaatagaatggactcaaatgaaatggaatggaaaggactcgaatgcaatggaatgg

SEQ ID NO: 3358 - DNA, 249 bp, Protomyxzoa rheumatica
ggagtggagtgcaatggagtgtggtggaatgcaatggagtggagtggaatagaatggagtggagtggaattcactggaatggagtggaatggactggagtcgactagaatggagttgagtggaatggaatggagttgagtggagtggaatggaatggagtggagtggagtggaaaggaatggagtgcagtggagtggagtggagtgaaatggagtggagtggagtgcaatggagtgtggtggaatgcaa

SEQ ID NO: 3359 - DNA, 163 bp, Protomyxzoa rheumatica
ttgtttccattctattcttttccattccattcccttccctcccattccactcgggttgattccattcctttccattccactcgaatacattccgttctattccactcggaatatttccactccattccattccatttcgttccattccattctattccgtacc

SEQ ID NO: 3360 - DNA, 245 bp, Protomyxzoa rheumatica
gcaatggaatggaatggaatggaatcaactcgagtggaaaggaatggaatgaaatggaaagcaatggaatgaaatcaactcgagtggaatggaatggaatggaatagatcggaatggattgcaacggaatgaaatggaatggaatgcaatggaatcaatcattccgagtggaatgtaagggaatataatggagtggaaagaagggaatggaaacaacccgattggaatgcaaggcaatggaatgg

SEQ ID NO: 3361 - DNA, 131 bp, Protomyxzoa rheumatica
gttgattcaattccattctattccattccattccattccagtcgggttgattccattccattcctttccattccattccgttccattccattcggtttgattccattccattcgattccattcgattccat

SEQ ID NO: 3362 - DNA, 211 bp, Protomyxzoa rheumatica
atggaatggaatcgaatggaatggaatcgaatggaatggattcaactcgaatggaatggaaagtaatggaatcaacccgagtggaatggcatggaatggaatcgaatggaatggaaaggaatggaatcaacccgagtgcagaggaatggaatggaatggaaggcaatggattggaatgaaatggaatggcatggaatggaatggaatcaac

SEQ ID NO: 3363 - DNA, 81 bp, Protomyxzoa rheumatica
aaacagacagaaagagagagagacggagagagagtgagtgtgagagagagagagacatggagggagagagacagacagaca

SEQ ID NO: 3364 - DNA, 172 bp, Protomyxzoa rheumatica
cattccattccattccattccactcgggtggattccattgcattccattccatttcattgcacttggtttgattcctttccattccattccattccattccactcaattccattccatgccatcccattccggttgattccattccattccattccattccattgcattcca

SEQ ID NO: 3365 - DNA, 127 bp, Protomyxzoa rheumatica
tgcagtttttatataaagatatctccttctccaaaatagatctcaaagttatccaagtattcacttccagattctatggaaagattatctcaaaactgctcaatcaaaccaaaggttcaactctgtg

SEQ ID NO: 3366 - DNA, 199 bp, Protomyxzoa rheumatica
attccattcgggttgttccattccattccattccattccactacattccattgcactcgggttgattccattccattcaattccattccattccatttcgttccattccagtctattccgtaccattccattccattccattccagtccattccattcctttccgtatgattccattccattgcattccattccattcc

SEQ ID NO: 3367 - DNA, 155 bp, Protomyxzoa rheumatica
ccctccattccattccattccacaggggttgattcaattcctatctgttccattccagtcctttccattccattccgttccattccattccatcccatgccattctgttccacttggggttgattcaaatccattctattccattccattctatt

SEQ ID NO: 3368 - DNA, 168 bp, Protomyxzoa rheumatica
gggttgattgcattccattccattccattctactccatttcgttccattccattctattcggtagcattccatttcattccattccaatccattccattccatgccattccacttgggttgattcccatcctttccattccattcgggttgaatccattccattccat

SEQ ID NO: 3369 - DNA, 179 bp, Protomyxzoa rheumatica
gaatggaatggaatggaatggaatggaatagaatggaatgccttcaaatcgaatggaatggaaaggaatggaatcaacacgagtggaatggaatggaatgtaatggaatggaacggaatggaatggaatgatacgtaatagaatggaatggaacgaaatggaatggaatggaatggaat

SEQ ID NO: 3370 - DNA, 104 bp, Protomyxzoa rheumatica
ggaatggagtggaatggaatggaatggagtggaatggagtgaagtgggctgaagtggaatagattggaatggaatggaatggagtggaatggaatggaatggaa

SEQ ID NO: 3371 - DNA, 177 bp, Protomyxzoa rheumatica
ggaattgaatcaacccgagtgcaatggaatggagaggaattgaatgaaatggaatggaaactacacgaatggaatggaatgtaatggagtgtacgggaattgaatagaatgaatccgaatggaatggaatggaatatacacgaatggaatggaatgtaatggagtgtaagggaattg

SEQ ID NO: 3372 - DNA, 136 bp, Protomyxzoa rheumatica
aacccgagtggaatggaatggaatggaatagaatggaatgcagtaaaagggaagagaatcaacccaattggaatggaatggaatggcattgaaagtaatggaatggaatggaatggaatggaaagcaatggaatgg

SEQ ID NO: 3373 - DNA, 134 bp, Protomyxzoa rheumatica
gaattgaatcaacccgagtggaatggaatggaatggaatggaacggaattgaatcaactcgtgaagaatgggatggaatggaatggagtggaatggaatggggtggaatagaatggaatttaatcaacacgagt

SEQ ID NO: 3374 - DNA, 127 bp, Protomyxzoa rheumatica
tggaatggaatggaatggtacggaatagaatgcaatggaacgaaaaggaatggaatggaatggaatggaacggaatgcaatggaatcattccgaatggaatagaagggaatgaattcgagtggaatg

SEQ ID NO: 3375 - DNA, 158 bp, Protomyxzoa rheumatica
gattccattccatgccattctattacattcttttccattccattccattcgtttccatttcattcggttacattccattcctttccattccattccattccattccagtagactcaatttgactccattccttacccttccattccagtggattccat

SEQ ID NO: 3376 - DNA, 139 bp, Protomyxzoa rheumatica
ggaatggaatggaatggaacggaatggaatggaatggaatcaacacgattgcaatcgaatggaatggaaaggaattaaccctaatagaatggaatggattggaatggaacggaacggaatggaatggaatggaatggaa

SEQ ID NO: 3377 - DNA, 170 bp, Protomyxzoa rheumatica
cattccattccattcatttcttttccattcgagtccattcctctccaatccattccatgccagtccattccaatccattccattccattcgagtccactccattccattcctttccattcaatatctttccattaaactccactcgattctattccttttgattctattc

SEQ ID NO: 3378 - DNA, 133 bp, Protomyxzoa rheumatica
gtggaatggcatggaatggaatggaatggaatggtacggaatagaatgcaaagaaacgaaatggaatggaatggaatgaaatggaacggaatggaacggattcattccgagtggaatagaagggaatgaattc

SEQ ID NO: 3379 - DNA, 106 bp, Protomyxzoa rheumatica
cactcgcgttgattccattccattccattccattccattcaaatccattccattacaattcggtccattccattctattccgtaccattccattccattccatacc

SEQ ID NO: 3380 - DNA, 119 bp, Protomyxzoa rheumatica
ggaatggaatggaatggaatggaatggaatggaatggagatgaatggaatggaattgatttgaatggaatggaatcaactggaatggaatgcaatggaatggaatggaatggaatggaa

SEQ ID NO: 3381 - DNA, 103 bp, Protomyxzoa rheumatica
tcattccattccattccactccattccattccattccattacacttgcattgattccattccttttcattccattccattccactccattccattccattcca

SEQ ID NO: 3382 - DNA, 162 bp, Protomyxzoa rheumatica
ttccttccactccactccagtctattccattcctttctattccaatccattccattccactccactccactctacttgattccactccactccattccactcctctccactccattccacttcacacaactccactccaatccagttcactccattccattc

SEQ ID NO: 3383 - DNA, 123 bp, Protomyxzoa rheumatica
agtggaatggaagggaatggaatggaatggaagctaatagaatggaatcaacccgagaggaatggaatggaaaggactggaacggaatggaatggaatggaatcaactcgattgtaatggaat

SEQ ID NO: 3384 - DNA, 163 bp, Protomyxzoa rheumatica
ggaatggaatggaatggaatggaatggaatgcaatggaatggaatcaacccgagtgcattccattgcattctggttgtttccattccattccattccatttcagtccattccattgcactcaggttgattccattccattccattccattgcattccattcca

SEQ ID NO: 3385 - DNA, 91 bp, Protomyxzoa rheumatica
ttccattccattccattccattccattccgttccgttccactccactcggtttgattcaattccattctattccattccattccattccat

SEQ ID NO: 3386 - DNA, 106 bp, Protomyxzoa rheumatica
ttccatgccattccactcgggttgattccattcctttccactccattcggattgaatccattcctttccattccattccattccattctattccactccattccat

SEQ ID NO: 3387 - DNA, 123 bp, Protomyxzoa rheumatica
ggaatggaatggaatggaatggaatgaacccgtgtgcaatagaatggaatcgaatggaatggaatggattggaatggattgaactcgaatggaatggaaaggaatggaatcaacccgagtgga

SEQ ID NO: 3388 - DNA, 129 bp, Protomyxzoa rheumatica
tccattccattccattccattccattccattccactcagtttgtttccattccattctattccattccacgcggattgtttcaatttcatttcattccattccattcctttccattccattccattcca

SEQ ID NO: 3389 - DNA, 142 bp, Protomyxzoa rheumatica
tggaatggaatggaatggaatggaaacatccgaatggaatggaatgtaatggagtgtaagggaattcaatagaaacaatccgaatgtaacggaatggaatgcaatgaaatggaatggaatggaatggaatggaatcaacccg

SEQ ID NO: 3390 - DNA, 149 bp, Protomyxzoa rheumatica
tccattccattccattccattccattcaattccattccatgccatcccatttgggttgattccattccattccattccattccttgccatttcattctattccattcctttccattccattccgttccattccactcgggttgatttca

SEQ ID NO: 3391 - DNA, 139 bp, Protomyxzoa rheumatica
ggaatgggttcaactcgaatggaatggaaaggaatggaataaacacgaatggaatggcattgaatggaatggaattgaatgaaatggaatggaatggagtggaatgaaatttaatggaatggaatggaatggaatcaac

SEQ ID NO: 3392 - DNA, 117 bp, Protomyxzoa rheumatica
atggaatggaatggaatggaatggaatggaaaggaatggagtaaataaaatggaatttatttgaatggaatggaatcaaatggaatggaatggaatggaatggaatggaatggaatg

SEQ ID NO: 3393 - DNA, 126 bp, Protomyxzoa rheumatica
aaactatgtgttgtatactgtagataaaatatcaaagtacacaaagtatgtattatatactgtatgtaatatatcaaagttcccaacgtatgtgttatatattgtacataaaatatcaaagtaccc

SEQ ID NO: 3394 - DNA, 214 bp, Protomyxzoa rheumatica
tccattccattccagtccattccattccactcggatgggttccattccattccattccattcctttccattccattccgttccactcgggttgattccgttccaatccattccattccaatccattcctttccgttccattccattccattccatgccattccattccattccgttccattgcactagttttgtttccattccagtccattcca

SEQ ID NO: 3395 - DNA, 185 bp, Protomyxzoa rheumatica
cattctataccattccattccattccattccattccattccatttcgttcaattgtgctcgagttgattcaattccattctattccattccattacattccattctactctggaggtttccattactttcctttccattcgattccattccattccattctattccattgcattccattccattc

SEQ ID NO: 3396 - DNA, 155 bp, Protomyxzoa rheumatica
cattccattccattcccctgcactcgggttgattccattccatttcattccatttcattccgttccattccattccattccattctattcgagttaattccattccattccattaaaattccattccattccattccattgcaatcgagttgatt

SEQ ID NO: 3397 - DNA, 123 bp, Protomyxzoa rheumatica
ttccattccattccattccgttccgttccgttccgttccatttgattccattctattcgggttaattccattccattcctttcgattgcaatcgaggtgattccattccattccattccattc

SEQ ID NO: 3398 - DNA, 178 bp, Protomyxzoa rheumatica
ggaattgaatggaaatgaaagtaatagaatggaatggagtgtaatggaacaatatggaatggagtggaattgaatgcagtggacacaaatcgaatggactggaatggaatggacacgaatggaatggactgcagtggaatggacacgaatggaatggaatggaatgaaatggaatgga

SEQ ID NO: 3399 - DNA, 87 bp, Protomyxzoa rheumatica
attccattcctttccattccattccattacactcggtttgattccaatccattccattccattccataccattccattccattccat

SEQ ID NO: 3400 - DNA, 141 bp, Protomyxzoa rheumatica
tggaatggaatggaatggattcaacccgaatggaatggaagggaatggaataaacccgagtggaatggcatggaatggagtggaatggaattgaatggaagggaatggtacggaatagaatggaatggaacgaaatggaat

SEQ ID NO: 3401 - DNA, 98 bp, Protomyxzoa rheumatica
tggaatggaacggaacggaatggaatggaatggaatggaacgtaacggaatggaatggatggaatggaatggaatcaacgcgagtgcaggggaatgga

SEQ ID NO: 3402 - DNA, 146 bp, Protomyxzoa rheumatica
attccattccattctattccattccattccattccattctggcagattccattccatttcattccattccattccattcccctgcactcgcatttattcttttcagttccattccattccattccattccattccgttccgttcca

SEQ ID NO: 3403 - DNA, 188 bp, Protomyxzoa rheumatica
gaattgaattgaattaacgtgagtggaatggaatggaatggaagttaatggaatggaatagaattcaattgaaacaacccgagtggaatttaacgtaatggaatggaatgaaatgaattggaatggaatggagtagaatggaattgaatcaacacgagtggaatggaacgaattggaaaagcatggaa

SEQ ID NO: 3404 - DNA, 141 bp, Protomyxzoa rheumatica
ttccattccattgccttcaattccattccatttccctgcactcgggttgattccattccattccattccatttcattccattccatatcgttccattccattctattccataccattccattccattccattccattccat

SEQ ID NO: 3405 - DNA, 94 bp, Protomyxzoa rheumatica
cattccattctattcgggttaattccattccattccattcccttacattccatagcaatcgagttgattccattccattccattccattccatt

SEQ ID NO: 3406 - DNA, 131 bp, Protomyxzoa rheumatica
cattccattccattccattccattccattccggatgattcaattccattacattccgttccattacattcccctgcactcgcgttgattcattccattccattccattccacaccattccattccattcca

SEQ ID NO: 3407 - DNA, 163 bp, Protomyxzoa rheumatica
attacattgcactcgggttgattccattccattccattcctttacatttcattccattccactccattccatgccattccacgcgggtttattccattcctttccattacattcgtgttgaatccattccattccattccattccattcgattccattacact

SEQ ID NO: 3408 - DNA, 151 bp, Protomyxzoa rheumatica
cattcgatgtctttccataacgatccattccattctattcctttcaattccatttcattctatttcattccattcgattcccttccattggactcctttccattctagtgcattccattccgttccatttctttccgttctgtacgattcc

SEQ ID NO: 3409 - DNA, 143 bp, Protomyxzoa rheumatica
tccctttccattccactcaattccactccactccactccactcaactaaactccactccactccactccattccattccactccatcactttctattcgactctattccactccactccactccactgccttccattccattc

SEQ ID NO: 3410 - DNA, 95 bp, Protomyxzoa rheumatica
aaatccgggtggagtggaatggaatgtaatggagtggaatataatggaatttattgaaatggaatggaatggaatggaatggaacggaatggaat

SEQ ID NO: 3411 - DNA, 137 bp, Protomyxzoa rheumatica
ttccattccaatccattccattccattcgggttcattccactccattccattccattccattccgttgcattccattcgtgttgattaacttcccttccattccattccatcccatcccattccattccgttccatt

SEQ ID NO: 3412 - DNA, 93 bp, Protomyxzoa rheumatica
catgccattccactcgggttgattccattgctttccattccatttgggttggatccaatccattccattccattccattccattccattccat

SEQ ID NO: 3413 - DNA, 142 bp, Protomyxzoa rheumatica
tggaatggaatggaatggagtggaatggaatggaatgaaatcaacccgagtgcaggggaatggaatggaatggaaggcaatggaatgacaccattcggaattgaatggaatggaatggaatggaatggaatggaatcaactc

SEQ ID NO: 3414 - DNA, 138 bp, Protomyxzoa rheumatica
atggaatggaatgaaatggaatggaatggaatggaatagaatggaattcaatcaacccgagtggaaaggaatggaatggaatggcatcctaaggaaaggaatggaatgcattcgaatggaatggaatcaacaagaatg

SEQ ID NO: 3415 - DNA, 164 bp, Protomyxzoa rheumatica
tgcaatggattcaactcgattgcaatggaatggaatagaatggaatgaaatggaatggaatgcaattaatccgaatagaatggaatggaatggaatggaacggaatggaacataatggaatggaatggaatggaatggaatggaatggtatggaatggaatgga

SEQ ID NO: 3416 - DNA, 245 bp, Protomyxzoa rheumatica
cattccattccattcgattccattccattccattccattccgttccattccattgcattacattcacattgattctattcaattcccttacactccattatattccaatccattcttgttgtttccattccattccattccatttcactccattccattgcattcgggttgattccattccattccattccattgcattccatttcattccattccggatgattccattccattgcattccgttc

SEQ ID NO: 3417 - DNA, 100 bp, Protomyxzoa rheumatica
tagaatggaatggaatggaatggaacggaacggaacggaatgaaatggatttgaatggaatggaatggaatggaatggaacggaaaggaatggaatggaa

SEQ ID NO: 3418 - DNA, 91 bp, Protomyxzoa rheumatica
gagtgcaggggaatgtaatggaacggaatgcaatggaatgaaatcatccgaaatggaatggaatggaatggaatggaatcaacccgagtgc

SEQ ID NO: 3419 - DNA, 87 bp, Protomyxzoa rheumatica
tggaatggaatggaatggaatggaatggaatggaatcacccagagtataattgaatggaatggaatggaatggaatggaatggaatg

SEQ ID NO: 3420 - DNA, 155 bp, Protomyxzoa rheumatica
tggaatggaatgcaatggaatggaatcttccggaatggaatggcatggaatggaatggaatggaatgcaatggattcaactcgattgcaatggaattcaatagaatggaatggaatggaatggaatggaattaaaccgaatagaatggaatggaa

SEQ ID NO: 3421 - DNA, 122 bp, Protomyxzoa rheumatica
cattccattgcattccattccattccattcccctgcactctggttgaatccattccattccattccattacattccgttccattccattccattctattcgggttaattccattccattcca

SEQ ID NO: 3422 - DNA, 94 bp, Protomyxzoa rheumatica
ttccattcgggttgaatccattccattccattccattccactcaattccattatattgcactcgggttgattccattccattccattccattcc

SEQ ID NO: 3423 - DNA, 105 bp, Protomyxzoa rheumatica
attccattccattccattccattgcattccattccattccgttccatttcattatattcgggttaattccattccattccattccactccattccagtcctttcc

SEQ ID NO: 3424 - DNA, 150 bp, Protomyxzoa rheumatica
tggaatggaatggaatggaatggaatggaattaacccgaatacaatggaatgtaatggaatggaacggaatggagtggaatggaatggaaacaacacgagtgcaggggagtggaatggaatggaatgcaatggaatggaatcatccggaa

SEQ ID NO: 3425 - DNA, 99 bp, Protomyxzoa rheumatica
gaatggaagggaatggaatggaatggaaactaatagaatggaaacaacccaagaggaatggaatggaaaggactggaatggaatggaatggaatggaat

SEQ ID NO: 3426 - DNA, 89 bp, Protomyxzoa rheumatica
attccattgctttgcattccattccattccattccattccggatgataccattccattgcattccgttccattacattcccctgcactc

SEQ ID NO: 3427 - DNA, 142 bp, Protomyxzoa rheumatica
gcaatggaatggaatggaatggaatcaactcgagtggaaatgaatggaatggaatggaaaggaatggaatgaagtcaactcgagtggaatggagtggaaagtaatggaatggaatggattggaatggattgcaatggaatga

SEQ ID NO: 3428 - DNA, 132 bp, Protomyxzoa rheumatica
ggaatggaatggaatggaatggaatggaatcaactcgatatcactggaatggaatggaatagaatggaatggaattaacacgaatagaatgcattggaatggaatggaatggaacggaaaggaatggaatgg

SEQ ID NO: 3429 - DNA, 100 bp, Protomyxzoa rheumatica
cactcgggttgattccattccattccattccattccattcgattccattctattcccctgactcgcgttgattccattccattccattccattccattcc

SEQ ID NO: 3430 - DNA, 154 bp, Protomyxzoa rheumatica
ttgattccattctttccattccattcaagttgaatccattacattgcattccataccattccattcccctgcagtcgggttgattccattctattccattccattctattccattccattccgttccgttccgttccgttccattccattccat

SEQ ID NO: 3431 - DNA, 139 bp, Protomyxzoa rheumatica
ccgaatagaatggaatggaatggaatggaacggaacggaatggaatgtaatgggatggaatggaatggaacggaaaggaagggaatggaatggaatataatggaatggaatggaatcaacgcgagtgcaggggaatgga

SEQ ID NO: 3432 - DNA, 130 bp, Protomyxzoa rheumatica
ccattccagttgattccattggattccattccgatccaatacatttcattccattccattccatcccatcccattccattccgttcgattccattcgtgttgattccattccattccattccattacatt

SEQ ID NO: 3433 - DNA, 146 bp, Protomyxzoa rheumatica
tggaatggaatggaatggaatgcaaagcaatggaatcaactcgattgcaatgtaatggaatggaatggaaaggaatacattggaatcaacccgagtggaatggagtggaaaggactggaatggagtggaatggaatggaatggaat

SEQ ID NO: 3434 - DNA, 147 bp, Protomyxzoa rheumatica
ggaatggaaaggactggaatggaatggaatggaatggaatggaatcaaatcgattgtaatggaatgtaatggaatggaatggaatggaatggaattaaccccaataaaatggaatggaatggaatggaatggaatggagtggaatgg

SEQ ID NO: 3435 - DNA, 123 bp, Protomyxzoa rheumatica
cattcctttccattctagttgattccattccattccattccagtccgttccattccagttgtttccattccattcatatcaattccaatgaattccactccattccattccattccattcaat

SEQ ID NO: 3436 - DNA, 83 bp, Protomyxzoa rheumatica
caactcgattgcaatcgaatggaatggaatggaattaacctgcatagaatggaatggaatggaatggaacggaacggaacgga

SEQ ID NO: 3437 - DNA, 83 bp, Protomyxzoa rheumatica
aatggaatgtaatggagtggaatgtaaaggaatttagtggaatggaatggaatggaatcaacacgaatggaatggaacggaat

SEQ ID NO: 3438 - DNA, 215 bp, Protomyxzoa rheumatica
aatggaatgcaatagtatggaatggaatcgaatggaatggaatcgagtggattggaacgaaatcgaatggaacggaatagaatagactcgaatgtaatggattgctatataattgattcgaatggaatggaatcgaatggaatgcagtccaatggaatggaatgtaatgcaatggaacggaatcgaacggaatgcagtggaagggaatggagagg

SEQ ID NO: 3439 - DNA, 150 bp, Protomyxzoa rheumatica
tagggtactttgatattttatatacagtatattatatatattatgtgtactttgatatattatgtacagtatataatatatagtatgggttgtttgatattatatgtacagtatataatatatagtttgggtagtttgatattttaagta

SEQ ID NO: 3440 - DNA, 147 bp, Protomyxzoa rheumatica
gtattcctttctattccattccattccactcagattgtttacatctcattccattccactccattccattccattacattccactcgcgttgattccattccgtctcattacattcatttccattgcattccattccattccattcc

SEQ ID NO: 3441 - DNA, 148 bp, Protomyxzoa rheumatica
tggaatggagtggagtggaatggggtggagtggaaagtaatggagtggagaggagtgtattggactgtagtggagtggaatggagtggaattgaatgggatggaatggaatggagtggagtggaattgagtggagtggagtggaatgg

SEQ ID NO: 3442 - DNA, 146 bp, Protomyxzoa rheumatica
tcaaatccactccactcaactccactccactcggctctactccattccattccattccattccattccatttcattccgttcctttccattcaattccactaaattcaattccattccacaccactacattgcattccatttcaca

SEQ ID NO: 3443 - DNA, 141 bp, Protomyxzoa rheumatica
tccattcaatgcaattccattcctttccattcaagtccattaaactccattcgactccattccattccattccattcaggtcaattccattccatttcattcaggtccattccactgtattccattctattccattcaagt

SEQ ID NO: 3444 - DNA, 153 bp, Protomyxzoa rheumatica
cttcaatgccctccatttcataccattccattctactccactccactctaatccactcaattccaatcaattccattccattccactccactccactctacatcactccactccactcaactccgttcaatcccattgcattccgctccattg

SEQ ID NO: 3445 - DNA, 147 bp, Protomyxzoa rheumatica
tccattccattccattccattgcattccattcaattccatgccattccactctgcttgattccattcctttccactgcattcgggttgaatccattccattccattccattctttttgattccattctattgcactcgtgttgattc

SEQ ID NO: 3446 - DNA, 81 bp, Protomyxzoa rheumatica
aaggaacggaacagaatggaaggcaatagaacggagtggactggagtgaattgaattggagttttctggaggggataggag

SEQ ID NO: 3447 - DNA, 150 bp, Protomyxzoa rheumatica
aatgtaatggaatgcaatggaatcaaatgaacacgaatggaatggaatgtacaagaaaggaatggaatgaaaccgaatggaatggaatggactcaaaatgaatggaatggaagtcaatggacttgaaatgaatggaatggaatggaatgg

SEQ ID NO: 3448 - DNA, 157 bp, Protomyxzoa rheumatica
aatggaattggatgtaatggaatggaaaggaatgactcgaatgtaatagaattgtgtggaatggcatggaatggaatggaatgtactcgaaaggaatggactcaaatggtattgaatggagtggaatagcaccaaatggaaaggaatagaatgaaat

SEQ ID NO: 3449 - DNA, 143 bp, Protomyxzoa rheumatica
tggagtgtagtggaatggaatggaatggaagagagtggagtgtaatggattttaattgaatggaatggaatagaatggaatgaaatggagaggaaaggaatggaatggagtgtaacggaatggagtggattggaatggaatgg

SEQ ID NO: 3450 - DNA, 143 bp, Protomyxzoa rheumatica
cctttccattccgttctgttctgttccattccactccattccacttcatctctttctattccactccattccactccattccatttcattccattgctctccattccactccactccattccactccattccatttcactcca

SEQ ID NO: 3451 - DNA, 162 bp, Protomyxzoa rheumatica
tggaatggaatggaatgaaatgcattggaagggagtggaatagaatggaatcaactcgactggaatgcaatggagtgcaatggaatggaatggaatggaatggattgcaatgcagtgaaatggaatgcaatagaacagaaaggaatggaatggaatgaaggg

SEQ ID NO: 3452 - DNA, 169 bp, Protomyxzoa rheumatica
agatgtttcaatttcattctattccattgcatcgcattccattccattccattccagttgattcaattctattctatttcattccattccattccattccactccattccattcctttacaaactggttgtttcaattcaattccatgctgttccattccattctactc

SEQ ID NO: 3453 - DNA, 155 bp, Protomyxzoa rheumatica
ttccattcaattccattttttcagttccattccattcgactccattccattcgagccattcaattgcattccattccattccattccattccaatctgttggattacattttattcctgtccactccattcgagtacattccattcaagtccatt

SEQ ID NO: 3454 - DNA, 145 bp, Protomyxzoa rheumatica
tgcaatagaatggaatggaatcaactcgagtggaatggaatgaaatgtaatggaatggaatgcaatagaatagaatgcaatggaatggaatcaagtagcctcgaatgcaacagaatgcaatgcaatcaactcaagtggaatggaa

SEQ ID NO: 3455 - DNA, 159 bp, Protomyxzoa rheumatica
atggagtggatcggggtgtagtggaatggaatggaatggagaggaatgggttggagtgcagtggagtggtatggagtggaatggagtggaatggattggagtggaaaagaatgtaatggaatggaacagaatggagaggaatggaatggaatggaatgg

SEQ ID NO: 3456 - DNA, 121 bp, Protomyxzoa rheumatica
tgataaggatgataatgatggtggaggtgatgatcatggtaaaggtaatagtgatagtgatgatgatggtgatgatgatgatgataaggatgataatgatggtggaggtgatgatcatggt

SEQ ID NO: 3457 - DNA, 143 bp, Protomyxzoa rheumatica
cgaatggaatgcactggaatagaatggactcgaaaggaatggactcgcatagaaaggactaaaaaggaaaggaatcaaaaggaatggaatcgatggtaatagaatcgaatggaatggaataggaatgcaaacgaatggaacgg

SEQ ID NO: 3458 - DNA, 139 bp, Protomyxzoa rheumatica
tgtctgcactgatcactcatctgatgtaacgcttgtctaaactgcgcctaaaggggattgtgacagatatatccactgatcgcccaggtgatgtaccaattttctgcgatatgtctgcaggggacattgtgacatatct

SEQ ID NO: 3459 - DNA, 148 bp, Protomyxzoa rheumatica
gtagaggacaggagtggaatggagtggaaaggaaaggggtggaattgaattgaacatagtggagtggagtggagtggagtggtgtggaatggagttgaatggaatggggtcaaaggaattgaatgaattggagtggagttgactggaa

SEQ ID NO: 3460 - DNA, 141 bp, Protomyxzoa rheumatica
attctgttcctttccattctgttctgttccattccattcctttctattccactccattccattccattccattccaatccactccactccattcaattccactccattctactctagttcactccactccactccactcca

SEQ ID NO: 3461 - DNA, 143 bp, Protomyxzoa rheumatica
cattcgtttccattccattcgtgtcctttccactccattctatttcattcgagttcactccattccattccattccattcgagtccattcctttagattccattccattcgattccattctactcgattccactctgttccat

SEQ ID NO: 3462 - DNA, 150 bp, Protomyxzoa rheumatica
ggaatggaaaggagtggagtggagtttattggcgtgaagtggaatggagtggaatggtatgaaaagcaatggaatggaattgaatggaatggaatggaatctaatagaggggagtggagaggagtggagtggaatggagtggaatggagt

SEQ ID NO: 3463 - DNA, 140 bp, Protomyxzoa rheumatica
atccatgacattttggtccattccattgcatttcattcgatgccattccattctattctattccattcgagtccattccatttgagaccattctgttccactgcattccatcccatccgcttccattccattctattact

SEQ ID NO: 3464 - DNA, 142 bp, Protomyxzoa rheumatica
ggaatggaacggaatggactaaaatggaatagaatcgaatgcaatggacacaaatggaatgcaatggaatggactcgaatggaatagaatagacaagaatggaatggaaagcagtggaatggaatggaatggactcgaatgt

SEQ ID NO: 3465 - DNA, 140 bp, Protomyxzoa rheumatica
cattccattccattggagttgattacattccattctattgcattcctttccattccattccattccattccatttcaatcccctcgagttgattccattccattgttttgccttccattccattccattgcattccattc

SEQ ID NO: 3466 - DNA, 163 bp, Protomyxzoa rheumatica
ggaatggaatggaatggaatggaatggaatggagtcaaatggaatagaatcaaacggaacggcatcgaatggaatggaatggaatataatggaatagaatggactcgaatggaatggattcgagtggaatagaataggatggaatggcattgaattgaatgga

SEQ ID NO: 3467 - DNA, 140 bp, Protomyxzoa rheumatica
ctattccatttcttgccattgcattccattccattgcattcttttcgtgttgattccaatccattacaatctgttccatgccattccattcccctccattccattccattccagtcgagtggattccactgcattgcatt

SEQ ID NO: 3468 - DNA, 154 bp, Protomyxzoa rheumatica
tggagttgagtagcatggagtagagtggaaaagagaggagtgtagtgcagtggagttgactggattggatcggagtgcagtggaatggaatggaatggaatagagtggagtggagtagaatcgagtggagtggagtgtagtcgaatggagtgga

SEQ ID NO: 3469 - DNA, 158 bp, Protomyxzoa rheumatica
aatggagtgtagtggaagggaatggagtggaatgcagtgcagtggagtgaaatgcagttaaatggaatgaagaggagtggaataaaatggagtggagtggaatggaatgtaatggaagggagtggagtggagttcaatggagtggggtctaatcgagt

SEQ ID NO: 3470 - DNA, 153 bp, Protomyxzoa rheumatica
ttccattccattccattccattccatttaaattttattcgtttccattccattgaagtccattcctctccagtccattccattcgagtcaattccattccagtccattccatcaagtcctttcaattccattccattgcattcaaaatctttc

SEQ ID NO: 3471 - DNA, 158 bp, Protomyxzoa rheumatica
aatcgggttggtttcattccataccattccactctaatccatgccattccattccattccattccattctattcctgtccattccattccatttaattccattccattcctttccattccattccattctactggtgtttattccattccactccatt

SEQ ID NO: 3472 - DNA, 163 bp, Protomyxzoa rheumatica
ttccattccattccattccattgcattcgtgttgattccaatccattaaaatctattccattccattcaattccattccattccattccttgccactcaggttgattccattccatcccatttcattccataccattccattccattccattcaattccattc

SEQ ID NO: 3473 - DNA, 151 bp, Protomyxzoa rheumatica
cacacttcactccactccactccacttcacaccactccgctccattgcattccactgcaccccactccactccattccatttcattgcattccacccacgacacgtgattacactccattccattccattccactccactccattccattc

SEQ ID NO: 3474 - DNA, 141 bp, Protomyxzoa rheumatica
agtggagtggaatggactagaatggaatggaaaggaattaaacggactggaatggaatgcaatggaatagactcgaatggaatggaaaggaatggaatgcaatgtgctcgaatggaaaggattgcaatgcaatggaatgga

SEQ ID NO: 3475 - DNA, 138 bp, Protomyxzoa rheumatica
ttccattctattccattccattccattcgatgccattccatacaattatgttccataggtgtccattcctttcgaatccattccattccattccattccgttccatgagattacaatccattcgattgcattccattc

SEQ ID NO: 3476 - DNA, 140 bp, Protomyxzoa rheumatica
aattctatttccttcgactcgtgttgattaaattccattcaattccaccccattccatttcactccattccattccattccattcttcacgagttgattaaattccgttccattccattccattccattccattccattc

SEQ ID NO: 3477 - DNA, 153 bp, Protomyxzoa rheumatica
atggagtggattggaaaggagagaagtggaatggagtgaaatggagtggaatgaagtgcagaggaatgaaatggaatggaaaggagtggagtggaacagagtggagtggagtggaacggagggaagttgaatagaatggagcagaatggagga

SEQ ID NO: 3478 - DNA, 81 bp, Protomyxzoa rheumatica
attgcattccattccattaaattctgctccattcctttccgcactaccccattccaccccattccattccattcgtttcca

SEQ ID NO: 3479 - DNA, 134 bp, Protomyxzoa rheumatica
catagcaatccattactttcgagtctattctattcccttccattcgattttgttccaattccttcgattccattccattcgattccattccattctattgcattccattcgattacattatattcgaataagtt

SEQ ID NO: 3480 - DNA, 185 bp, Protomyxzoa rheumatica
tttcactccactcccctccattccgttccactccaaaccattccattcctttccattgcattccattccattccactcccctccattccattgaattccactccatttcattccattccatgccatttcattccatttcactccactccactccacaacactccactctactccactgcattcca

SEQ ID NO: 3481 - DNA, 160 bp, Protomyxzoa rheumatica
tggagtggaacggaatggtgtggaatggaatggaaaggaatgaaatggagtggagttgaaaggagtggaatggaatggaatggagtggagtggaaagtagtggagtggagtggaatggggtggagtggaatggaatggatttgaatgtaatggaaaggca

SEQ ID NO: 3482 - DNA, 152 bp, Protomyxzoa rheumatica
gaaatcgagtggaatcatcatcgaatggaatcgaattgaatcatcaaatgaaatcaaaaggaatcaacatcgaatggaatcgaatagaatcatcaaatggaatcaaatggaatcatcaccgaatggtatcgaatggaatcatagaatggttt

SEQ ID NO: 3483 - DNA, 143 bp, Protomyxzoa rheumatica
tcgaaaggaatggactggaatggaaggtactcaaatgcaatggactggagtggaatggaatgaaatcgaatggaatggaattgaatagaatggaattgaatagaatcgaaaggaatagaatggaattgagtgtaatgaaaaga

SEQ ID NO: 3484 - DNA, 144 bp, Protomyxzoa rheumatica
tgcttccattctgttcgattccattccattcaattgcattccattcctttcgaatccattccgtttccattccttttgtttccattcctatccattcgagtccgttccattccactcgattctattccatttgattccattgca

SEQ ID NO: 3485 - DNA, 158 bp, Protomyxzoa rheumatica
gtatataatatatagtttgggtagtttgatattttaagtacagtatgtaatatatagtttgtattatttgatattttatgtacagtatacaatatatagtattggtactttcatatttcatgtaaagtatatagtttgagtactttgatattttatat

SEQ ID NO: 3486 - DNA, 200 bp, Protomyxzoa rheumatica
ttccattccattccattccattccactcggtttgattccaatccattctattcctttccattccaatccattccactcgtgttgattccattccatttcattccattccattccattccaataaattccactcagactgtttccattccattccattaaattctattccattcctttccatgccatttcactcggggtaa

SEQ ID NO: 3487 - DNA, 166 bp, Protomyxzoa rheumatica
atgtaatggagtgtaagggaattgaatagaatcaatccgaatctaatggaatggaatggaacggaatttaatggaatggaatggtatgaaatggaatggaatggaatggaatagagtggaatcaacccgagtggaatagaatggaaaggactggaatggaatggaa

SEQ ID NO: 3488 - DNA, 219 bp, Protomyxzoa rheumatica
cattccattccattccattccattccagttgattccattgccttccattccgatccaatccatttcattccattccaatccattccattccattccactaaattccattacattccactcaattacattccattccactccacccggatttgttccattccattccattccattacattccactcgggtggattccattgcattccattccattccatt

SEQ ID NO: 3489 - DNA, 349 bp, Protomyxzoa rheumatica
gatgattccattccattgcattccattccattccattcccatgtactcgggttgattccattccattccattccaatccatgccattccactcgtgttgaatccattctttccattccattcaagttgaatccattccattgcattccattccattcaaatcccctgcagtcgggttgattccattccattccattccattcaattgcattccattccattccactccattccagtcctttccattccattacgctcgggttgattccattctattcctttccattccattccattccattgcaatcgcgttgattccattgctttgcattccattccattccattcca

SEQ ID NO: 3490 - DNA, 108 bp, Protomyxzoa rheumatica
cattccattgcattccactccattcaattccattccattccactgcattccattgcagtccatttcattccattccactccattccactccactcgattacactccac

SEQ ID NO: 3491 - DNA, 202 bp, Protomyxzoa rheumatica
tcctttccactccactcctttccattccactccattccattccagtccactccactcctctccactcaactccattccaatccattccattccattccactcgattccattccagtccactccattctattccattccattccaatacactccactccattccactccactccattccatttcactccactcctttatattc

SEQ ID NO: 3492 - DNA, 143 bp, Protomyxzoa rheumatica
tgcactccattccattccattccataagaatccataccactccattccactccactccacgctattccactccactccactccattacattacattccatttcaaatccattccattccattcctttcttttgacaggatctc

SEQ ID NO: 3493 - DNA, 176 bp, Protomyxzoa rheumatica
tgcagtggagtagagtttagtgtactggaatggaatggaatggattagagtgtagtggagtgagtggagtggagtggagtggaatggaatggaatggaaggaatggaatggaatggaatggattggagtggaaagaagtggagtggaatggaatggaatggaatggagtggaatgg

SEQ ID NO: 3494 - DNA, 163 bp, Protomyxzoa rheumatica
caccaggggaatgaaatggagtggaatggaacggaatgtagtggaatggaataaacaccaggggaatgaaatggattggaatgaaatcgaatggaatggaatggaatgaaatggaatggatcagaatggaatccaaaggaatcaactggaatggaatggaatg

SEQ ID NO: 3495 - DNA, 165 bp, Protomyxzoa rheumatica
aagtacatcaaatatagattatataatgtacataaaataccaaagtacccaaaatatgtattttatactgtacatgaaataacaaagttcacaaactatatattatatactgtatataaaatatcaaagtaaccaaggtatatattctatactgtacaaaaaata

SEQ ID NO: 3496 - DNA, 123 bp, Protomyxzoa rheumatica
gtggagtgtaatcgagtggagtggaatggagtggaatggagtgaaatggactgcaatggaatgcagtggaatggaatggagtagaatggaatggaattgaatggagtggaatgcaatggaatg

SEQ ID NO: 3497 - DNA, 126 bp, Protomyxzoa rheumatica
cattccattccattccactccactccactccattccattcgattccattcctttccattccactccactccattccactccattctactccattccaatccattccactccattgcagtgcattcc

SEQ ID NO: 3498 - DNA, 285 bp, Protomyxzoa rheumatica
ttccattccattccattccattccattccattccattcccatccgctccgttccattccatcccattccattcgggttgattctattcaattcctttacactccattcccttgcattccattccacacaattccattccattacattccataccaagtgggttgaatgcattctattccatttcgttccattcatttctattgtgtaccattccattccattacattctattccattccatgccattctactcgggttgattccattccattccattccattcca

SEQ ID NO: 3499 - DNA, 191 bp, Protomyxzoa rheumatica
tcaacccgagtggaatggcatggaatggaaaggaatggaatggaattgaatggaaaggaatggttcggaatagaatggattggaacaaaatggaatggaatgtaatggaatggaatgtaatggaatggaatggaatggaatcaacccgagcgcaggggaatggaatggaatggaatgcaatggaatggaat

SEQ ID NO: 3500 - DNA, 154 bp, Protomyxzoa rheumatica
tccattcgattccattcgattcaattccatttgattctctttcattctattttattccatgccatttgattgcattgcattccattccgtttgattccagtccattcaagaaagttccattccagtccattgctttccagtccattccattcca

SEQ ID NO: 3501 - DNA, 251 bp, Protomyxzoa rheumatica
attccattccattcatttcaattccattccattccattcctttacattccacttgattcctctccattcccttccactgcatcccgttcgattccattccattgcattgcattccattccattggattgcattctattcgattccattccattcgaatcaattacatagcaatccattacattcgagtttattctcttccgttccattcgttttcgttccaatccattcgattccattccattcgattcca

SEQ ID NO: 3502 - DNA, 155 bp, Protomyxzoa rheumatica
aatggaatggaatggaatgcaatggcatggaatggaatggaatggagtgcaacggaatagaatggaatggaatggaatggaattgattggaatgcgatggaaaggaatggaaaggaaccacctcaaatgcaaaggaatagaatggaatgcattgg

SEQ ID NO: 3503 - DNA, 154 bp, Protomyxzoa rheumatica
atgcaatggaatggaaagattgaatcaagcagagtagaatggaatggattggtatggaatggaatggaatggaatggagtagaatgaaactgaatcaaccagagtggaattgaatggaacggaatggaacggaatggaatggaatggaatggaa

SEQ ID NO: 3504 - DNA, 96 bp, Protomyxzoa rheumatica
ttccactccactccactcgattccactgcactccactccaatccattccattccagtccattccactccactccactcgattccactgcactccac

SEQ ID NO: 3505 - DNA, 148 bp, Protomyxzoa rheumatica
cattcttctccattccactgcattccatttcactcaactccactccattccactcaattccattccactccactttattcctctccattccattccattccattccggtccattccattccactccattcctctccactccactccac

SEQ ID NO: 3506 - DNA, 146 bp, Protomyxzoa rheumatica
attccattccattcctctcgtgttgattccacagcattcccttccattcattcctttccattccattccattccgttccattcccctcgggttgatttcattccattccattccattccatttcattccaatccatttcattcccc

SEQ ID NO: 3507 - DNA, 148 bp, Protomyxzoa rheumatica
gcattctattccattgcattccattgctttccattacattccattccagtccattccattccactccactccattccattctactccattgcactccactccactccactccactccaatccaccccattccattctattccattcta

SEQ ID NO: 3508 - DNA, 102 bp, Protomyxzoa rheumatica
ggaatgaaatggaatggcatggaatggaatggaatcaacccgagttcaatggattggaatcaaatggaatggaatggaatggaatggattcaacccgaatgg

SEQ ID NO: 3509 - DNA, 159 bp, Protomyxzoa rheumatica
gaatggaatggaatagaatggaatggaatgcaatggaatgtaatggagtggaatggaatgcaatggaatggattggaatggaatggaatcgaatgcaatggaatggaatagcgtggaatgtaatggaatgcaatggaaaggaatcaagccaggtggaat

SEQ ID NO: 3510 - DNA, 182 bp, Protomyxzoa rheumatica
ccattccattccagttgattcaattccattctattacattccatcccattccagtccattccattccattccactcggtttgattcaattctgttctattccattccattccattccattcctctccactcgggttgattctattccactccattccattccattccgtcccattcctgttg

SEQ ID NO: 3511 - DNA, 141 bp, Protomyxzoa rheumatica
tacagcctgtgtgatacagggagaacctttagaaagaaaggagtggaatgggatggagtggaatggagtggattggagtggagtggaatggagttgagtggagtaaaatggagtggagtggaatgtaatggagtggattgg

SEQ ID NO: 3512 - DNA, 148 bp, Protomyxzoa rheumatica
gaattgtgtggaatggaatggaatggaatggagtgtaaaggaattgaaaagaatcaacccgaatggaatggaatagaatggaatgcaatggaatggaatcaactcgagtggaatggaatggattggaatggaatgcaatggaatggaa

SEQ ID NO: 3513 - DNA, 146 bp, Protomyxzoa rheumatica
cactccactccactgcacttcaccacattccaatggattccattcgatgccattcgattccattcctttcgcttccattccattccattcaattccattccatttgattccaatcaattccattaccttccattccattccactcc

SEQ ID NO: 3514 - DNA, 124 bp, Protomyxzoa rheumatica
atggaatggaatggaatcaacgcgagtgcaggggaatggaatggattcaaatggaatggaatggaatggaatgcaatcaacccaagtgcaggggaatgtaatggaacggaatgcaatggaatgg

SEQ ID NO: 3515 - DNA, 85 bp, Protomyxzoa rheumatica
tcgttacattccattctattccgtaccattccattccatttcttaccattccattccattccattccattccattccgttccatt

SEQ ID NO: 3516 - DNA, 161 bp, Protomyxzoa rheumatica
tgaaatgcagtcgaatggaatgcactggagtggaatggactcaaatggaatggaaagtaatggaatggaaaggaatggaatgtaatgaaatggaatagaaaggaatagaatggaatggaattggatggaatggaatggaacggaatggagtcgaatggaat

SEQ ID NO: 3517 - DNA, 142 bp, Protomyxzoa rheumatica
gacgtggagtggaagggaatggaatacaatgaagtggagtagaatggagtggaatggaatggaatggaatggaatggagaagtggagtggagtggaattgagtggagtggagtgcagtagaatggaatggaatggaatggag

SEQ ID NO: 3518 - DNA, 143 bp, Protomyxzoa rheumatica
ttccattccactccactccattcaattcgattacattccattcctttccattccactcctctgcattccattccactccattcatctccactccactccattccacttcactactctccattccaatccactccattccattc

SEQ ID NO: 3519 - DNA, 151 bp, Protomyxzoa rheumatica
agtgtaatggaataatatggaatggagtggaatggaatgcagtggacacaaacggaatggactggaatggaatggacacgaatggaatggactggagtggaatgcacacgaatggaatggaagcgaatggaatggaatggaatgaaatgga

SEQ ID NO: 3520 - DNA, 145 bp, Protomyxzoa rheumatica
aatggaatggaaacaacacgagtgcaatgtaatggaatcgaatggaatggaatgcaatggattcaacccgaatggaatggaaacgaatggaataaaaccgagtggaatggcatggaatggagtctaatggaatggaatggaatgg

SEQ ID NO: 3521 - DNA, 129 bp, Protomyxzoa rheumatica
ccattccattccattccattccattccattccattcaattgtactccggttgattcaattccattgcattccattccattccattccactccattccgttgcattccattccattacattcggattgat

SEQ ID NO: 3522 - DNA, 138 bp, Protomyxzoa rheumatica
ccattccattccaatccattccattccattccattccactaaattcaattccattccactccactacattccattccactccacccggatttataccattctatttcattccattccattccaattgattccattgga

SEQ ID NO: 3523 - DNA, 152 bp, Protomyxzoa rheumatica
cattccattccattccattccattccattccattccgttcgattccattccattacattcggattgattcttttcaactcccttactctccattacattccattacattcgtgttgttccattccattccattccattccactccattccat

SEQ ID NO: 3524 - DNA, 108 bp, Protomyxzoa rheumatica
atgcaatggaatggaatagaatggaatgcaatggaatgcaacggagtggaaatgagtggaatggaatcgaatggaatggaatcgaatggaatggactggaatggaatg

SEQ ID NO: 3525 - DNA, 151 bp, Protomyxzoa rheumatica
tggaatggaatggaatggaatagaatggtactgaatctacacgagtggaatggaatggaatggaacggaatggaatggagtggaatggaatgtaatggaatgaattcaacaagaatggaatggaatggaatggaatggaatggaatggaat

SEQ ID NO: 3526 - DNA, 140 bp, Protomyxzoa rheumatica
ttccattccattccattccgctcgggttgattcaattccattctattccattcaattccattccattccaatcgattccattccacaccggttgattcaattccgttctattccattgcattccatttacctccattgca

SEQ ID NO: 3527 - DNA, 158 bp, Protomyxzoa rheumatica
ttccgttccattccgttccattccattccattccattctattcgaattaatttcattccattccattccattccattctattccattccattgcaatcgagttgaattcattgcaattcattccattccattccattccattccattccggaagattc

SEQ ID NO: 3528 - DNA, 227 bp, Protomyxzoa rheumatica
attccattccattccattccattccattccattccactcgggggcattcaattccattctcttctgttccattccattccattcctttctactcgggttgattcaattccattccataccattccattccattccactccataacattccattgcattacactcggggttgattcaaatccattctattccattccattccattccatcctattccattccattcca

SEQ ID NO: 3529 - DNA, 83 bp, Protomyxzoa rheumatica
ttccattccattccattccatcctattccattccattccactctattcctttcctttccgttccattccattccattccattg

SEQ ID NO: 3530 - DNA, 164 bp, Protomyxzoa rheumatica
ccattccattgctttccattccattccattccattccattccatgccattccactcgggtttattgaattcctttccattccattcgggttgaatccattcctttccattccattcagttcaattccattccattgcactcgggttgattccattccattccat

SEQ ID NO: 3531 - DNA, 140 bp, Protomyxzoa rheumatica
cgaatgtaatggaatggaatgcaacggaatggaatggaattgaatggaatggaatgcaaaggaatggaatcaacccgagtggaatggcatggaatagaatgcaatggaatggaatggaatggaatcaactcgagtggaaa

SEQ ID NO: 3532 - DNA, 137 bp, Protomyxzoa rheumatica
tctttccgttctgtacgattcctacctttcgatttcattttgttccagtccattgctttcgcgtccattccattccatttcattccattcgactccattccactcgattccacttcgttccatttcattgcattcca

SEQ ID NO: 3533 - DNA, 223 bp, Protomyxzoa rheumatica
ttccattccattccactccattccattccattccattccacacaattccattgcattccattccattccatcccaattgggttgaatccattctattccatttcgttccattctattccgtaccattccattccattcctttgcattccatgccattccactcgggtttattccattcattttcattccattcgggttgaatccattccattccattccattc

SEQ ID NO: 3534 - DNA, 122 bp, Protomyxzoa rheumatica
ggaatggaacggaatggaatggaatggaatggaatggaatcattctgagtacaggggaatggaatggaatggaatgcaatgcaatggaatggaatggaatgcaatggaatcaactcgattgc

SEQ ID NO: 3535 - DNA, 140 bp, Protomyxzoa rheumatica
tccattccattgcattccattccattccagttgattcaattcaattctattccattccattccatttctttccatttcattccattccattccactcgggttgattcagttctattccattacattaaattccattccac

SEQ ID NO: 3536 - DNA, 141 bp, Protomyxzoa rheumatica
atggaatggaatggaatggaatggaatcaacgcgagtacaggggaatggaatttaatggaatgcaatggaatggaatcttccggaatggaatggaatggattggaatggaatgaaatgcaatggattcaactcgattgcaa

SEQ ID NO: 3537 - DNA, 227 bp, Protomyxzoa rheumatica
gaaatggagtggaattctatagaatcaacacgagtggaatggaatggaaaggaattgaatgcaatggaatggaatggaatggaatccaatccaatgtaaaggaatggaacggaacggaatagaatgtaatggaatggaatggaatggactggaatggaaaaaattcgagtggaatggaatggaatgcaaagtaatataatggaaatgaatggaatccacccgcatgg

SEQ ID NO: 3538 - DNA, 87 bp, Protomyxzoa rheumatica
ccattccattccgttccattccattcgtgttgattaacttgcattcaattccattccatcccatcccattccattccgttccattcc

SEQ ID NO: 3539 - DNA, 81 bp, Protomyxzoa rheumatica
aggagtggaatgggatggagtggagtggaatggactggagcggggtgaaatggactggagtggaattgaatggaatggagt

SEQ ID NO: 3540 - DNA, 105 bp, Protomyxzoa rheumatica
ttggttactttcatattttatgtacagtatataatacatatttttggtactttaatattttatgtacagtatataatatatatttgatgtactttgatatattat

SEQ ID NO: 3541 - DNA, 136 bp, Protomyxzoa rheumatica
cattccactccattccagtcctttccattccattccactcaggttgattccattgtattcctttccattccattccattccatttcaatcgagttcattccattgctttgcattccattccattccattccattcc

SEQ ID NO: 3542 - DNA, 92 bp, Protomyxzoa rheumatica
tggagtggagtggagtggaatggagtggagtggaatggagtggggtggaatggagtggagtggaatggaatggaatggaatggaatggaatg

SEQ ID NO: 3543 - DNA, 150 bp, Protomyxzoa rheumatica
cattccattccattccattccattcggttccattccgttccattccattccattacattctattcgaattaattccattccattccattccattccattctattccattacattgcaatcgagttgaatccattgcatttcattccattc

SEQ ID NO: 3544 - DNA, 95 bp, Protomyxzoa rheumatica
gaatggaatcaactcgagtacaatggaatggaatggaatggaattgaatgcaatggaatggaatcaactcgagtacaatggaatggaatggaatg

SEQ ID NO: 3545 - DNA, 101 bp, Protomyxzoa rheumatica
aatggaacggaatggaatgggatgggatggaatggaatgggatgggatggaattgaatggaatggaagttaatcaacacgaatggaatggaacggaatgga

SEQ ID NO: 3546 - DNA, 163 bp, Protomyxzoa rheumatica
tccacacaattccattccattccattccactccaattgggttgaatccatttcaatccatttcgttccattccattctattctgtaccattccattcatttccttaccataccatgccattttaatcgggttgattccatttcattcctttctattctggttc

SEQ ID NO: 3547 - DNA, 87 bp, Protomyxzoa rheumatica
ccattccattccataccattcctttccattccattccattccattcggaatggaatggaatggaatggaaaggaatggtatggaatg

SEQ ID NO: 3548 - DNA, 81 bp, Protomyxzoa rheumatica
aatggaatggaatggaaaggaatggtatggaatggaatggcatggtacggaatagaatggaatggaacgaattgtaatgga

SEQ ID NO: 3549 - DNA, 116 bp, Protomyxzoa rheumatica
tagaatgaacccgagtggaatggaatggtatggaatgaaacggaatggaatggaatggtatggaatggaatggaatggtattgaacggaatggaatggaatggaatagaatccaat

SEQ ID NO: 3550 - DNA, 143 bp, Protomyxzoa rheumatica
tccattccattccattctattcgcgttaattgcattccattccattccatcacattccattgcaatcgagttgattccattccattccgttccattccattatattccattccatttcgttccattccattctattccgtacc

SEQ ID NO: 3551 - DNA, 91 bp, Protomyxzoa rheumatica
ttccattccattgcattccattccaatccattccattccattccacttgagttgattcaattccattctattccattccattccattccat

SEQ ID NO: 3552 - DNA, 177 bp, Protomyxzoa rheumatica
ttccattccattacggatgattcctttccattgcattccattccattccattccactgtactcggcttgattgcattccattctattccaatctatgccattccactcgtgttgattccattctttgcattccattgaagttgaatccattccattgcattccattccattcgattc

SEQ ID NO: 3553 - DNA, 162 bp, Protomyxzoa rheumatica
tccattccattccattccattccattccattccattccatctcattgcaatcgagttgattccattgcattccattcctttccattccagtcctttccattccattccactcgggttgattgcattctattagtttccattccattccattcccttccattc

SEQ ID NO: 3554 - DNA, 92 bp, Protomyxzoa rheumatica
gaatggaatgcattcgaatggaatggaatcaacaagaatgtaatggaatgcaatggaatggattggaatggaatgtagtgaaatgaaataga

SEQ ID NO: 3555 - DNA, 144 bp, Protomyxzoa rheumatica
ccattccactccattccattccattccattacattccattgcattcctgtccattccattccattgaattccattccattccattcctgtccattccattgcattccattccattccattccattccacccggattgattccat

SEQ ID NO: 3556 - DNA, 115 bp, Protomyxzoa rheumatica
ggaatggattggaatggaatgcaatggaatggaatggaatcaacacgaatggaatgaaacggaatggaatgggacgggatggaatggaatggaatggaagttaatcaacacgaat

SEQ ID NO: 3557 - DNA, 146 bp, Protomyxzoa rheumatica
tattcgggttaattccattccattccattccattccattcaaatcgagttgattccattccattccatttcgatccattccactctattccgttccatttcattccattccattccattccaatcgggttgattccattccattcc

SEQ ID NO: 3558 - DNA, 177 bp, Protomyxzoa rheumatica
ccattcccttccattccattccattccattccattccattgatatcgagttgattccattccattccattccattgaaatcgagttgattccattccattccattccgttccattccattgcattctattcgtgttaattccattccattccattccattccattccattccgttgc

SEQ ID NO: 3559 - DNA, 146 bp, Protomyxzoa rheumatica
atggaatggattggaatggaatgcaatggaatggaatggagtcaacctgagtggaatggaatggattggaatggaatggaatggaatggaatagaatgaaatgaacccgattggaatgggatggaatggaatggaatggaatggaa

SEQ ID NO: 3560 - DNA, 82 bp, Protomyxzoa rheumatica
tccattctattccattccattccattccattcccttccatatcattccattccattccattccactcgggttgattcaattc

SEQ ID NO: 3561 - DNA, 112 bp, Protomyxzoa rheumatica
ttccggatgattccattccattgcattccattccattccattagcctgcactcgggttgattccattcctttccattccattcaattccgttgcattccgttccattccatt

SEQ ID NO: 3562 - DNA, 581 bp, Protomyxzoa rheumatica
ttccattccattccattccattccattccattccattcctctccattcctttccatgccactccactccattccattccactccactgcattccactctactgtattccattccactccaatccactccgttctactccactccactccattccattccactctattccattccaccccaatccactccgttctactccactccactccattccaacccactccattccaccccactccattccaaaccattttactccactccattccattccactccactccactccactgcactccactccactccattgcattccattccactgcattcaattccaatccactccattccactccactccatgccattccattcgattccactccactcctctccactccactccattccattccattccactgcacactgatccatgccactcaactgcactccactccactccattacactccactaaatttcactctattccactccattccactccactccaatccactccactcctctacagtccattccattccactccattccattccattccactccat

SEQ ID NO: 3563 - DNA, 104 bp, Protomyxzoa rheumatica
attccactccattacattccattccactccacccggatttattccactcctttccattccattccattccattccagttgattccattggattccattccgatc

SEQ ID NO: 3564 - DNA, 153 bp, Protomyxzoa rheumatica
gttccattccactcgggttgatttcattccattccattccattcccttccattccatttcattccaacccatttcattcccctggtgtttattccattccactccattctgttccattccactccattccattccattccattccattccatt

SEQ ID NO: 3565 - DNA, 124 bp, Protomyxzoa rheumatica
ttccgttccgttccattccattccattccattctattcgggctaattccattccattccattcgattgccatcgagttgattccattcctttccattccattccattccattccattccgttcc

SEQ ID NO: 3566 - DNA, 154 bp, Protomyxzoa rheumatica
ctccattgcattccactccattcaactccactccattccattccattccattcgactccactccattccactccactccattccattcctcttcactcaattccattccactccattcctttccactcaactccattctactccactccaccca

SEQ ID NO: 3567 - DNA, 149 bp, Protomyxzoa rheumatica
gattaattccattccattgcattccattccattctattccattccattgcaatctatttgaatccattgcatttcattccattccattccattccattccattccgcaagattccattccattgcattccattccattccattcccctg

SEQ ID NO: 3568 - DNA, 100 bp, Protomyxzoa rheumatica
caccattaccatcatcactatcaccattaccatcatcaccaccattaccatcatcactatcaccattaccatcatcactatcaccattaccatcatcacc

SEQ ID NO: 3569 - DNA, 88 bp, Protomyxzoa rheumatica
gaatggaatggaattgaatggagtggaatgcaatggaatggaaaggagtggagtggagtggaatggaatggagtggaatggaatggaa

SEQ ID NO: 3570 - DNA, 85 bp, Protomyxzoa rheumatica
ttcgggttaattccattccattccattccattccattccactacaatcgagttgattccattccattccattccattccagtcct

SEQ ID NO: 3571 - DNA, 105 bp, Protomyxzoa rheumatica
aatggaatggaatggtatggaatggaatggaatggtacggaatacaatggaatggaacgaattgtaatggaatggaatttaatggaatggaatggaatggaatgg

SEQ ID NO: 3572 - DNA, 81 bp, Protomyxzoa rheumatica
tggaatggaatggaatggaacggaatggaacggaatggaaaggaatggaatggaatggtatggaatggaatggaatggtac

SEQ ID NO: 3573 - DNA, 133 bp, Protomyxzoa rheumatica
ccattccattccattccattccattccattccattccgctccattccattgcattccactcgccttgattccattctattctattccattccattccattccattccattacactcggtttgattccattcca

SEQ ID NO: 3574 - DNA, 81 bp, Protomyxzoa rheumatica
tttgaatagaatggaatcgaatgaaatacaatagtatggaatggcatcgaatggaatggaatcgaacggaatggaccggaa

SEQ ID NO: 3575 - DNA, 83 bp, Protomyxzoa rheumatica
ggaatggaatggaatgaaatggaatggaatggaatggaatgatacggaaaagaatggaatggaacgaaatggaatggaatgga

SEQ ID NO: 3576 - DNA, 82 bp, Protomyxzoa rheumatica
cattccattccattccattccattccattccattccattaccatcgagttgattccattccattccattccattccagtcct

SEQ ID NO: 3577 - DNA, 88 bp, Protomyxzoa rheumatica
ccattccattgcactcgggttgattccattccattccattacattccgttccattccggatgattccattccattgcattccgttcca

SEQ ID NO: 3578 - DNA, 91 bp, Protomyxzoa rheumatica
attccattgcattccattccattccattcccctgcactcgcgttgattagattccattccattccattccattccattccgttccgttcca

SEQ ID NO: 3579 - DNA, 118 bp, Protomyxzoa rheumatica
atggaatggaatggattcaacccgaatggaatggaaaggaatggaataaacccgagtggaatggcatgaagtggagtggaatggaatggaatggaatggaatggaatggtacggaata

SEQ ID NO: 3580 - DNA, 88 bp, Protomyxzoa rheumatica
ggaatgaaatggaatggcatggaatggaatggaatcaacctgagttcaatggaatggaatggaatggaatggaatggattcaacccga

SEQ ID NO: 3581 - DNA, 99 bp, Protomyxzoa rheumatica
ttcgggttaattccattccattccattccattccattccaatagagttgattccattccattccattccattccattccactccattccagtcctttcc

SEQ ID NO: 3582 - DNA, 86 bp, Protomyxzoa rheumatica
gaatggaatggaatggaatggaatggagtggagtggaatgcaatcgaatggaatggaatggaataaatccgggtggagtggaatgg

SEQ ID NO: 3583 - DNA, 86 bp, Protomyxzoa rheumatica
gaatggaatggaatggaatggaatggaatggaattaaccctaatataatggaatggaatggaatggaatggaagggaatggaatgg

SEQ ID NO: 3584 - DNA, 81 bp, Protomyxzoa rheumatica
ggaatggaatggaatggaagttaatcaacacgaatggaatcgaacggaatggattggaatggaatggaatggaatggaatg

SEQ ID NO: 3585 - DNA, 111 bp, Protomyxzoa rheumatica
ggttaattccattccattccattcgattgcaatcgagttgattccattccaatccattccattccattcctttccattccattacggatgattccattccattgcattcca

SEQ ID NO: 3586 - DNA, 117 bp, Protomyxzoa rheumatica
gtggaatggaagggaatggaatggaatggaaactaatagagtggaatcaacccgagtggaatggaatggaaaggactgaatggaatggaatggaatggaatggaatggaatggaatc

SEQ ID NO: 3587 - DNA, 160 bp, Protomyxzoa rheumatica
gaatggaatgccttcaaaccgaatggaatggaaaggaatggaatcaacacgagtggaattgaatggaatggaaaggaatggaatggaatggaatggtatggaatagaatggaatcaaacgaactggaatggaatggaatggaatggaatggaatggaatg

SEQ ID NO: 3588 - DNA, 84 bp, Protomyxzoa rheumatica
aatggaatggaatggaatggaatggaatggaatggaatagttctgagtggaataggagggaatgtattcgagtggaatggaaag

SEQ ID NO: 3589 - DNA, 97 bp, Protomyxzoa rheumatica
cgagtgcaggggaatggaatggaatggaatgcaatggaatcgaatcttccggaatggaatggaatggaatgaaatgcaatggattcaactcgattgc

SEQ ID NO: 3590 - DNA, 105 bp, Protomyxzoa rheumatica
tccattccattccattccacacaattccattccattccataccataccattccaattgggttgaatccattccattccatttcgttccattccattcttttccgt

SEQ ID NO: 3591 - DNA, 86 bp, Protomyxzoa rheumatica
tggaatggaatggaatggaacggaatggaacggaatggaatttaatggaatggaatggaatggtatggaatggaatggaatggtac

SEQ ID NO: 3592 - DNA, 132 bp, Protomyxzoa rheumatica
agtggaaagaagggaatggaatcaacccgagtggaatgcagggcaatggaatggaatggaaaggaatggaatggaataaactcgattgcaatcgaatggaatggaatggaatggaatggaaaggaatggaat

SEQ ID NO: 3593 - DNA, 95 bp, Protomyxzoa rheumatica
caattccattctattccattccattccattccattccattccgctcgtgttccttcaattccattctattccattccattccattccattccatt

SEQ ID NO: 3594 - DNA, 93 bp, Protomyxzoa rheumatica
tccattccattccattccattccattcaattccattccattacaattcgttggattccattctattccgtaccattccattccattccatacc

SEQ ID NO: 3595 - DNA, 84 bp, Protomyxzoa rheumatica
attccattccattccattccattccattccattccatgccgttacattccattccattccattccattccgttccgttccattc

SEQ ID NO: 3596 - DNA, 81 bp, Protomyxzoa rheumatica
cattccatcccatcccattccattccgttccattccattcattttgattccattccattccattccattccattccattcc

SEQ ID NO: 3597 - DNA, 97 bp, Protomyxzoa rheumatica
ttccattccgttccattccattccattccattccatttcggtccattccgttctattccgttccattccattccattccattccattccattccatt

SEQ ID NO: 3598 - DNA, 87 bp, Protomyxzoa rheumatica
ctattccattccattccattccattccattccattccactaggtttgattcaattccattcccttccgttccaatccattccattcc

SEQ ID NO: 3599 - DNA, 81 bp, Protomyxzoa rheumatica
attccattccatttcattccattccattccattccattccgttccattccattcgattccattccattcgattgcattcca

SEQ ID NO: 3600 - DNA, 145 bp, Protomyxzoa rheumatica
tgattcaattccattgtattccactgcattcctttccatttgattcgattccattccattccattccattccttactagttgtttcaattccatacttttcctttccattccattccattctattccactcgtgttgattccatt

SEQ ID NO: 3601 - DNA, 114 bp, Protomyxzoa rheumatica
ccaatccccttcattccattgcagtccacatcactccactccactccactccattccattccactccactacactccattccattccattccactctactccacaccactccac

SEQ ID NO: 3602 - DNA, 90 bp, Protomyxzoa rheumatica
ggaatggaatggaatcaacacgaatggaatggaacggaatggaatgagatgggatggaatggaatggaatggaagttaatcaacacgaat

SEQ ID NO: 3603 - DNA, 81 bp, Protomyxzoa rheumatica
cactcagttcaactccaccatgttccattttatgacactctattcctttccactcctttccactctggtaagctccatttc

SEQ ID NO: 3604 - DNA, 87 bp, Protomyxzoa rheumatica
ccattccattccattccattccattccattccattcctttacactggattggattctattccattccattccattccgttcaatacc

SEQ ID NO: 3605 - DNA, 85 bp, Protomyxzoa rheumatica
gaattgaatggaatagaatggaatggaatggaatggaatcaactggaatgcagtggaatggaatggaatggaacggaatggaatg

SEQ ID NO: 3606 - DNA, 81 bp, Protomyxzoa rheumatica
ttcattccattcgatttcattcgatttctttcctccagtcaattcaacttgttccaatatgattcaattcgatttgattcc

SEQ ID NO: 3607 - DNA, 82 bp, Protomyxzoa rheumatica
aatcgaatggaatggaatggaattaacccgaatagaatgggatggaatggaatggaacggaacggaatggaatggaatggaa

SEQ ID NO: 3608 - DNA, 81 bp, Protomyxzoa rheumatica
acggaatggaatggaatggacagtaatgaatggaatggaaaggtatggtgtggaatcaacacgagaggaatggaatggaat

SEQ ID NO: 3609 - DNA, 165 bp, Protomyxzoa rheumatica
aatggaatggaatggaatggaatggaatggaatgcaattgaatggaatggaataaaatggattggaatcaacccaagtggaatggaatggaatgggatggaatggaatggattggaatcaacccaagtggaatggaatggaatggaatgcaatggaatggaatgg

SEQ ID NO: 3610 - DNA, 94 bp, Protomyxzoa rheumatica
ccactaaattcctttacattccactccattacattccattgcactccacccggatttattccattccattccattccattccattccattccat

SEQ ID NO: 3611 - DNA, 122 bp, Protomyxzoa rheumatica
ccactcgggttgattccattcctttccactccattcgggttgaatccattgcattccattccattccattcgattcctttcaattgcactcgggttgattccattccattccattccattcc

SEQ ID NO: 3612 - DNA, 81 bp, Protomyxzoa rheumatica
aaacagacagaaagagagagagacggagagagagtgagtgagagagagagagagacatggagggagagagacagacagaca

SEQ ID NO: 3613 - DNA, 150 bp, Protomyxzoa rheumatica
attccattccattccattacattccatttcgttccattccattctattccgtacgattccattgcattccattccattccattcctttccattccattgaaatcgagttgattccattccattccgttccattccattccattccattcc

SEQ ID NO: 3614 - DNA, 81 bp, Protomyxzoa rheumatica
ccattccattctattcgggttaattccattccattccattacattccattcccttccattccattccattccattccattc

SEQ ID NO: 3615 - DNA, 90 bp, Protomyxzoa rheumatica
ccattcccttccattccattccattccattccattccattccatccaattgcaatcgagttgattccattgcattccattccattccatt

SEQ ID NO: 3616 - DNA, 130 bp, Protomyxzoa rheumatica
ttccattccattccattccattccgttccattccgttccaatccattccattccattctattcggattaattccattccattccattccgttctattccattccattgcaatcgagttgaatccattgca

SEQ ID NO: 3617 - DNA, 86 bp, Protomyxzoa rheumatica
ttccattgcattccgttccattacattcccctgcactcgctttgattccattccattccattccattccattcaattccattccat

SEQ ID NO: 3618 - DNA, 81 bp, Protomyxzoa rheumatica
gaatcactgtttctgtcgtatctggaagtggatatttcgagcgttttcaggcctaaggtgagaaaggaaatgtcttcaaat

SEQ ID NO: 3619 - DNA, 158 bp, Protomyxzoa rheumatica
tccgaatgtaatggaatggaatgcaacggaatggaatggagtggaatggaatggaatgcaatggaattgaatcaacccgagtacaatggaatggaaaggaatggaatggaatgtaatggaatggaatggaatgatacggaatagaatggaatggaacg

SEQ ID NO: 3620 - DNA, 85 bp, Protomyxzoa rheumatica
gaatgcagtggaatggaatggaatggaacggaatggaatggaatagaatggaatggaatggagtgcgatggaatggaatagaatg

SEQ ID NO: 3621 - DNA, 122 bp, Protomyxzoa rheumatica
actccattccattctattactttcatttccattcaattccattccattagattccattccactcggtttcattccatttgagtccattcctttccattccattccattccattccattccat

SEQ ID NO: 3622 - DNA, 83 bp, Protomyxzoa rheumatica
gaatggaatggaatggaatggtacggaatagaatggaatggatcgaaatggaatggaatggaatggaatggaacggaatggaa

SEQ ID NO: 3623 - DNA, 180 bp, Protomyxzoa rheumatica
ttacattccattccattcgggtagtttccattccattccattcccttcctctccattccattgcactcgggttgattccattccattgcattccagtccattccattcaattccattccgttccattccattccattaccttcggattgattctattcaactcccttactctccattaca

SEQ ID NO: 3624 - DNA, 84 bp, Protomyxzoa rheumatica
aatggaatggaatggaatggaatggaatggaatgaaatggattcgatcggaatggaatccaatggaatcaactggaatggaatg

SEQ ID NO: 3625 - DNA, 81 bp, Protomyxzoa rheumatica
tggaatggaatggaatggaatggaatggaatggaatcacctcgagtgcaggggaatggaatggaatggaatgcaatggaat

SEQ ID NO: 3626 - DNA, 84 bp, Protomyxzoa rheumatica
tagaatggaatggaatggaatggaacggaatggaacggaaaggaatggtacggaatagaatggaatggaacgaattgtaatgga

SEQ ID NO: 3627 - DNA, 81 bp, Protomyxzoa rheumatica
tagaatggaatggaacgaattgtaatggaatggaattgaagggaatggaatggaatggaatggaatcaacgcgagtgcagg

SEQ ID NO: 3628 - DNA, 81 bp, Protomyxzoa rheumatica
ccattccatttcgttccattccattctattccgtaccattacattccattccattccattccattccattccgttccattc

SEQ ID NO: 3629 - DNA, 482 bp, Protomyxzoa rheumatica
tggagtggagtggaatggaatataggggagtggaaaaaaatggattgaaatggaatggtggggaatggaatggagtcgtgtggagtggaatggagtggagtggaattgagtggagttgaatgtaatggaaaggtgaggaatggtatggaaaggtgtggagttgagtgcagtggtgtggaatgatttgaatggagtggagtgaaatggaatgaaacggagaagaatggcacggaatgtggtgcaatggaatggagtggataagaatggagtctaatggaagggagtggaatggagtggagtgaaatggaatgaaatggaatacaatggaatggagtggagtggagtggaatgcaatggcgtggaatgcaatggagtggagtggagtgtagtggaacagagttgaatggaattgaatggaacggaattgactggaatggaatgcaacgaaatggagtggaaaggagttgaatggaatctaaagg

SEQ ID NO: 3630 - DNA, 951 bp, Protomyxzoa rheumatica
ggaatggaatggagtggaatggaatggattggagtggaatggagtggagtggagtggaattgagtggaatgcaatgcagtggagtggaagggaattaaatggaatggggtataattgactggaatggagtggaatggactggagtggaatggattagaaaggagtggactggaatgcaatggagtggagtggagaggtgtggagaggagtggattggagtgcaatggagggcaatggagtggagtgtagtcgagtggtgtggaatggagtgtagtagagtggaatggaatggaggggagtggaatggaatggagtggggtggagtggagttgagtggaatgtaatataatggaatggaatagaatagaatggaatggaatgggtgctgcgattgtgccactgcactacagtgtgacagacggagatcctgtcgaaagaaaagagtggaatgtgatggagtgtagcggagtgcagtgaagtggaatggagttgagtggaatggattggagtggagtgtaaaggactggagtggagtggaatggactcgagtggagtggagtggactggaaagaaatggaatggaatgaaatggaatggaatgcactggaatggaatggaatggtgtggaatggaatgggtgctgagattgtgacactgcactgcagcctgtgtgacagagggagaccctgtcgaatgaaaagagtggaatgcgatgtagtggactggagtggattggagtggagtggagtagaatagagtggagtggagtgcactggagttgagtggagtagagtggactggaatggaatggaatggagtggagtgcaattgaatgaagtggtgtggaagagagtggagagaaatataatggaatggaatggaactgaatggagaggggtggagtggagtgcagtgcaatgtaatgtaatgtaatggaatggaatggaaagg

SEQ ID NO: 3631 - DNA, 646 bp, Protomyxzoa rheumatica
tttccactgcactccgatccactccactcaactccactccgctctgttccgttctgatcctatccatttcgttatattccattgaattctgttaaatttaattccattccactccccttcattccatttcactccactccactccactaaaatcctttccattctattccattccatttgattgcactccgaaccactctactcaactccactacactccactacactcctttccattccgttactttctgttccattctgttatattccacttcattccattctcatgcactccaatcaattccaatccgtttcactccattgctctccattccactccacttcactccactcctctacactgcactccacattgctacactccactaaattccattccactccattcaattccacttctttccattccattccattccattccattccaattcattccactccattccactccattgcattccatttcaccccactccattccactccactccactccattctactccactccattccacttcactccactccatttcactcaattccactccattccacgccactccactccacgccactccgttccattccactccattccattccattccactccattcca

SEQ ID NO: 3632 - DNA, 885 bp, Protomyxzoa rheumatica
actactgcattcaattccatttcattccattccgttccattccactccacttcattccattccaccccattccactccactcaaatcctcttcactccactccattccactcgtcttcagggcattccattccattccactacatccgttctcttccactgaactccatttcacttctctccgttccactccattccacttactaccgttccacaccactcaactctgttccactctactacattccattccactccactcgatccattccactccattccattccattccactccactcctttcccctccactgcactccattccactgtattccactacattccattccatttcaccctattccattccactcctctcaattgacctccactatattccactccactccagtccactccattccatacaattccgcaccactctgctccactccattccgttacactccaccccactgacttccattccattccactccattccattccatttcacttctttacactcctttccactccatttcaagtaagtccactctaattcactgcactccactccattccattccactgcattgtactcatctccattcctttccacagcactccattccattcctttcattccattccattccaatccacttcattgcattccaccccattccactccactcctctccacttcactccactccattcctctcctcttccgggcattccattccattccactaaatccgttcccctacattccatttcattttacttctctgtattaaactccattcgattaatttccattccacaccagtccactctgttccactccactcctttccattccactccactccatccca

SEQ ID NO: 3633 - DNA, 1097 bp, Protomyxzoa rheumatica
attccattccattccactccattcgatttcattccttgccactccataacaatcctctccattccactccattccattaaattccattccttcccacttccctccattcctttctgttccattagattccattccattccattccattcctctccatcccactccattctatgccattccgttgtattccattaaattccatttcactccattccactcatcctttctagtccactctgttccattgcattcccttccacaccattccattctgttccacttctctccaatccattccactctattccattccagtctaccacagtccattccactccattccatttcacttcgttccatttcaatccattccattccgttttttctattccaatccactccattccactccattccactccactccactcatattcaatcatctccactgtactccactcaattccattccattccactccactccattctgttccattccattccactccacccccttccattccactccattccatttaattccattccactccattccattccaaagaactccacttcaatccactgcaatccattcaattccattccattcccttccactccactccattccattccagtccactcgattccattccattccattccataacattccattccattccattccattccactcctttccattacattgcactccccttctttcctttctattaaatttcattctacttgagtacattccattcctttacactacattccattccactccatccattaacatccattcaattccactctaccccatcccattacattcgattccattccattgcattccattccattccaatccattgcactccactcaattccactccactccattccatgccactccatttcattccactacacaccattccattctattctattctattctactcctctccattccactgtattcctctccactctactccatttctctctacttcattccattccattccaccacactccgttccattccattccactccactccattccactccattcca

SEQ ID NO: 3634 - DNA, 960 bp, Protomyxzoa rheumatica
tggaatggaatggaatggaatcgaacggaatgtacttaaatggaatgaactctaaagtaatggatttgaatggaatggaatcgaatgcaacggaattgaatggcatggaaacgaacggcatcgaatgaaatcaaactgaatgcattgaagtggagtggagtggaatggagaggaatggaatgggtggagtggaattgaatggagtggagtggagtggagttcagtggagtgaaatggaatggaatgggaaggaatagatctgaatggagtggaatggagtggagtggatcggactaaaatggaaaggactggaatggaatggaacggaatggaatgcactcgaatggaatggactcgaatggaatggaattgaatggaattgaatcaaatggagtagaaaggaatcgattggaatcgaatggaattcgtagaagtggagtggattggtgttgaacagagtggaatggaatggggtgggatggaacagaatggagtggagtggaaggtaatggagtggaatggaatggaatgagaaggaatggacctgaacagagtggattggaatgcaatggaatggagtggagaggagtgcagtgaagtggagtggaggtgaatgcaatggagtggaatgagctggaattgaatggacttgaatagaatggacaggactgaaatggaaaggaatgcagtggaatggaatggaatagaataaaaaggattggaattgacaggcatcgaatgggatcaagtggaatgtggtgaagtggagtggagggggatggaatggaatggaatgtcctggaatggaattgaatggagtggagtggagtggaatggggtggaatggaatggaatgggaaggattggaatttaactgagtggagtggagtggaatggagaggaatggaatggacaggacttgaatgaaatggacttgaatggaatggaatggaatggaat

SEQ ID NO: 3635 - DNA, 374 bp, Protomyxzoa rheumatica
attcaatggaatgtaatggaatggagtgaagtgtagtggagtggaatgcagtggagtggagtgcagtggagaggagtggaatggagtggaatttaatgtgatggaatggaatggagtagaaaggaatggagtgcagtggagtggagaggagtacaatggaattgtttggaggagagtggagtgcagtgcagtggaatgcaatggaatgtaatggaaaggagtagggttgtgtggagtggaatggaatgcagtggaatttaatggagtggagtgcagtggaatgtagtggagtagagtgcagtgctgtggaaaggagtggagtggagtggaacagaatggagtggaatggattttaggggagtggagtggagtgg

SEQ ID NO: 3636 - DNA, 286 bp, Protomyxzoa rheumatica
tggagtggaatggaaggcaatggaatggaacagaaagaaatggatctcagtggagaggagtggagtgtagttcagtggagtggatcggagtgcagtgaaagggaatggaatgtaacggaatggagtgcagtggaaagcagtgcagtggagtggagtggaatggaggggaatgtcgttgaatagattgcagtggagtggaatggaatggaaaggaacagaatggaaaggaatggaacggaatggaatggaacagaaaggaacggagtggaggggagtggagtggatt

SEQ ID NO: 3637 - DNA, 503 bp, Protomyxzoa rheumatica
gagtggtttggaatggaatggagtagagtggaatggaatggaatggaatgaatcggaatggaatggaaacaaattccataatgtggaaggaatggaatggagtggaatggaatcttgtggaatgcaacagaaggcaatggaatggaaaggagaggagtagagtgtagtggaatggaatgaacaggtatggaatgtaacctaaagtagttgaatggaatggagtagaatggaatgcggtggaatgaaatggagtgttatggaatgcaattgagtggaatgcggtcgaatggagtggagtgtaatggaatggcatggaatcgagtggattggaatggattgggattgagtggagtggaatgcaaaggagtggaatggaatggaatggattggattggagttgagtggaatggaatggaatggagtgtagtggagaggagtttataggagtggagtggagtggaagggagtggaatggattggaatggaatggaattgaacggagc

SEQ ID NO: 3638 - DNA, 1012 bp, Protomyxzoa rheumatica
tccattccattccattccagtccattccattcaagtccataacattcgagtccattccattccagtctgatacattcagttccattccattccattctattccatttcttttgattccattccattcgagtccattccattgcagtcaattacattcgtgtccaatccattccattccaattcattccattccattctgttccattccattcctgcccattaaattcgagtccaatccattcctttccaattcattccattccattcggttccattccattcctgcccattactttcaagaccattccatttcattccatttggttcaaatccatgctattccaaccgattccatttgattccattccattccattcctttccattcgagtccattccatttgagtacgtcgcattctgttacattccattcgagacctttcctttgcagtcaattgcatctgagttcattccaatccggtctattacattggattccattccattagattccattgcattcgatgccagtcctttgggttccattccattcgagccctttccattccattccattccattcgagaccattccatttcattccattcctttagtgtccattccattctagtccattccaatcgattccattccatttgattcaattcctttccaatccattccattcaactccattccaataattccattcaactcgattcttttgcagtccattccattgcattagacgccattccattcaagtccattccactcgattccattcaattccagtgcattgcattcgagtccattccatttgattccattccattccgttacttttcattccgttccattccattatattcgattcctttcaattcgagtccattccattccagtgcattccattcggtttcattccattcaattcattccatttgatttcattacattcgattctatgccattcgtttgcattccattcgagctcattcccttccagtcca

SEQ ID NO: 3639 - DNA, 157 bp, Protomyxzoa rheumatica
gaatggaatggagtggaatggaatggagtggaatggagtgcagtggaatagagaggaatgaaattgaatggaacagaattgaatgtattgaaatgcatcgaattggagtggaatggggtggaatggaatgcaaaggaatggaattgagtggagtgga

SEQ ID NO: 3640 - DNA, 304 bp, Protomyxzoa rheumatica
ggaatggagtggaatggaatggagtgcagtggaatggaaagaagtggaatggaatggaatgcaatggaacgaagtggagtggagtgcagtggaatggagtggactgaaattgagagagtggaatggattggagtgcagtggattggaatggaatggaagggtacggaattggtggaatagagtttaatggaatgaaatggaaggcagtatagtggaatggactggagtgcagtgaagaggagtggaatggactggagtgtagagggattgagggcagtggagtagaatggagtggaatggaatg

SEQ ID NO: 3641 - DNA, 328 bp, Protomyxzoa rheumatica
ggaatggaaggaaatggagtggagtggaatggagtgcagtacagtggaaagggaaggaatcaaaaggaatggaatcgaatgtaatggaatggaattgaatggaatccaaagaatggaattgagtggaatggaatcgaaaggaatggaaatgaatggaatggaattgaatggtattgaaaggaatcgaaaggcatgtggtgaagtggagaggagtggagtggagtggagtggaatagattggaatggaatgcggttcaatgaaatgcaatgggaaaaaatgtaattgaactgtgtggagtggagtgcagtggagtggaatggaatggca

SEQ ID NO: 3642 - DNA, 299 bp, Protomyxzoa rheumatica
ggaattgagtggaatggaatagaatggaatggaatggaaacgaatggaatgaattgcaatggaatggatttgaatggaatggactggaacaaaatggaatcgaacgaataggaatcaaatggaaaggaatggaatggaatgaaatggaaaggaatggagtcgaatggaatggaatcgaatggaatgcaattgaatggaatcgaaaggaaaagaatggaatggagtttaatggaaagatattgaattgaatggaatgggttcgaatggaaaggactggagtggaatggactcgaatgtaa

SEQ ID NO: 3643 - DNA, 752 bp, Protomyxzoa rheumatica
atggattggaatgaaatggaatggaatggaatggaatggaatggattggagtggagtggagtggaatcgaatagaatggagaggagcagaattgaatggaatcgaatagagtggaatggaatggagaggaatggaaaggaatggaatggaaagaaatggagtggaatggaattgaatggattggagtggaatggaatggaatgggcggggatggaatggagatgaggggattggagtggagtagagaatagtggattggaatgcaaaggaaaggaatggaatgcaatggaacactatagaatggtatggagtttactggaatggaatggaatgcagatgagtggaatgtaattgaaaggaatggaacggaatggagtggactagagtggaatggaatggagtagattggaatgcaatggaatggattgtaatagaatgcaatgcagtggaatggaaagttgcggagtggagtagcgtggagtggaatggaactgaatggaattctatttaatggaaatggaagtaaatggaatagaatggagtagagtagaatggagtggaatggagtcgaatgtagagcagtggaatggaatggaaagcagttgagtggaatggaacggagttgaatggaaaagagtgtaatggagtagagtggagatgaatggaattgagaggaatgaagtgaggtggaatggagtagaatatagcggagtggaatggaatggaatggaatggaatggaatggagtggag

SEQ ID NO: 3644 - DNA, 767 bp, Protomyxzoa rheumatica
ttccattccattcccttccattccattccattccattcaatttctctacactccattcaattccataacattcaattccattccactgcattcctttacattccactacaccccgatgcattcctttccactgcaatcctttcaaatccattcctctccactccactccattccacgccactacattccattcaattatcatcccatcgaacccactccactgcactacactacactccattccacccctttccattccattccattccaataccatccactcgaacacattccactcaactccactccactccactccgttccactccagtccaccccattatattccattccattcaaataccatctactcgaacacactccactcaactccagtccattccattctactccattccattcctctccaatgaaatccattccactccattccattccacctcataccattacactccactccattcctttccgtttcactccagtacattcctctccattgattccattccactccactccaccctattccattccattccattccattccattcttttcagtttcattccattcgaccccactccacaccactccgttcctttccaatccattccattttattccattccactccactccattacattccactcccctccactccactccactgcactccattccactccattccactccattccactgcattccattacagtccattccattgtatccattcc

SEQ ID NO: 3645 - DNA, 147 bp, Protomyxzoa rheumatica
tgaggccatgattaagagggacggccgggggcattcgtattgcgccgctagaggtgaaattcttggaccggcgcaagacggaccagagcgaaagcatttgccaagaatgttttcattaatcaagaacgaaagtcggaggttcgaaga

SEQ ID NO: 3646 - DNA, 199 bp, Protomyxzoa rheumatica
ctggtggtgcccttccgtcaattcctttaagtttcagctttgcaaccatactccccccggaacccaaagactttggtttcccggaagctgcccggcgggtcatgggaataacgccgccgcatcgccggtcggcatcgtttatggtcggaactacgacggtatctgatcgtcttcgaacctccgactttcgttcttgatt

SEQ ID NO: 3647 - DNA, 132 bp, Protomyxzoa rheumatica
ccaggagtggagcctgcggcttaatttgactcaacacgggaaacctcacccggcccggacacggacaggattgacagattgatagctctttctcgattccgtgggtggtggtgcatggccgttcttagttgg

SEQ ID NO: 3648 - DNA, 1174 bp, Protomyxzoa rheumatica
ccattccattccattgcgttgcatttcattccactgcactctgatccactctgctcaagtccactcccctacactccactgcactccactccgttcccattctttccattccattccattccactcaactccactccatttctttccactccattccactccactatactccactacactcctatccattccattccattccatttcactgcactccaatccactgcacgctattccactccactcagtttcactctgttccattttgttcctttccgttccatccctttctgttccattccactccattccaatacactccactccattccactcctatccattccgctcttttccattccattccattccactccattccactccattctactccactccattacactaaactgcatttcactccacttcactccattccactccattccattccatatcattccattccactccactccattctgctctactccattccactccactgcattccactccacaccactccattccactccattccattcctctccactccaatccattccattccatttttctccattccgttccattcctttatttcgactggatctcactctgtcacccagaatggagtgcaatgtcacaatcttaactcacatttcatttcaccattccattcctctaaagtccactacaccccattccacaacactccattcctttccattccactccactccactaccctacgctccactccactccactccattccattccactccactccattccgtacaactccagtgcactccattgcactccactccattaatttccactccattccactccattccactccactccactccattacattccacttcgctccattccatttcaatcctcttttttcccttatattccattccatttcactccattgaattcccctccattgcattccactccattccattcctctccacttcattccattccactccactcaattccattccattctactccagtcccttccattcctttatttcgactgtatctcactctgtcccccagactgcaatgcagtggcacaatcttaactcacattttatttcaccgttccattccattccattccattccattccattccatt

SEQ ID NO: 3649 - DNA, 561 bp, Protomyxzoa rheumatica
caatcgattccactccactccactccattccatcccattgaattccactcgattccacttcactccactccacaccactcctcacccctcctttacattccactccaccccattccattccactgcactccactcgactccagtcaaatccagtccactccactcagctccactccactccactccattccattccattcaactccattcaattccattcctttctttcgacaaggtctcattctgtcacccagcctggggtgcagtggcactatatccgctagcatttcatttcacattcctttccattgcattccattccattgcattcaattgcattatgtttctttaagttccattccatcccattccattccactcctacacactccagtccacttcactccactgcactccattccattcctttcaattccattcctttcaattccattccactcctctccactctactctgctccattccattccattccatcccattcaatttcactatactgcactccactctactgcactccactccactccattccattc

SEQ ID NO: 3650 - DNA, 311 bp, Protomyxzoa rheumatica
ccattcaactccactccattctattccactccattctaatacactgcactgcattcgactccactccattccattaaactcccctccattccactccattccattcaattccatttcccccactacattccattccattcctctccactccattcaactctactaaactccactccattccattccacttcactgtattccactccactccattccattccactccactcaactctactaaaatctacaccattccattccacttcattgtattccactccactccactccgttccactccattccgttcc

SEQ ID NO: 3651 - DNA, 418 bp, Protomyxzoa rheumatica
tggaatgaaatggaattgaatgcagtagtgtggacaggaatggaattgagtacaatggagtggactgcagtggagtggagtggaaaggagtacaaaggaggggaatgaagtgcagtggagtggaatgtattggaatggaatggagttgagttgaatggaatggagtggagaggaatggaatggagtgtagtagagtagagtggtgtggaatggaatgaaatggaatgcagtgttgtggagtggagtggaattgaatgtagtggagtggaatagagtggtgtggagagaaactgggatggaatgaagtggagtggagtagagtggactggagtggagtggggtggaatggagtggagtggagtggaatggaatgctgtggagtggaatggagtggaatggaatgaagtggagtggaata

SEQ ID NO: 3652 - DNA, 426 bp, Protomyxzoa rheumatica
ggagtggagtggaggggaaggaagtggagtggactagaatggagtggaatggagtggaatggaatgcagtggacaggaatggaatggagtggagtgcagtggattagagttgagtggagtcgagtgcagtggattagaatggaaaagattgcaatggagaggagaggaatggaatggagaggggtggaatggattgcaatggagtggaatggaatgcaatggagtttagttgagtagagtggagtggaaaggagtggggtggaatggagttgagtggattggagaggaatggaatcgagtggagtcaaattgaaaagagtggagtggaattgagtggaatggattgcagcggagtggaattgtgtagaatggaatgaagtggaatggagtggagtggagtcaagtggagtggagtcgaatggagtg

SEQ ID NO: 3653 - DNA, 138 bp, Protomyxzoa rheumatica
cattcctttccactccattccatttcattccactgctttcccctccgttgcactccatgtcattgcagtccactttactacactgccttccactcctttccattccattccttgccgttgcattccattccattccat

SEQ ID NO: 3654 - DNA, 142 bp, Protomyxzoa rheumatica
ccaccccaatcctctcccctccattcctttccactgcatcccaatccactccattccattacactccaatccattccattacacttcacgccaatccattccaccccactccattgcattccattctattccactctaatcc

SEQ ID NO: 3655 - DNA, 158 bp, Protomyxzoa rheumatica
cattactctcccctacactccattccactccactccattctactcctctccattcctctccacaccattccactccaatcaattcctttcaattcctttgcattccattccactccatatcattctattacacttcactccattacactccagtccac

SEQ ID NO: 3656 - DNA, 200 bp, Protomyxzoa rheumatica
agtccattccactccattccattcctttccacgccactcctatggactccaagccacttctatcccctacagtccaatgcactgcaatctactccactccagtccactccactccattactctccattccactacactccacttcactcaattccattctattccactccactccattccgttccattccactccactct

SEQ ID NO: 3657 - DNA, 255 bp, Protomyxzoa rheumatica
ttccactcctctccactccattcaattccattacacatcattccattccacttcattcaactcaactccacctcaccgcattcaattcgattcctttcaatgcctttcgaattcatttgatttgattccatttgattccattttttccattcgattccattcaattccattcgattccatttcattctattccattcgatttgattctattccatttgattccattccattccattccactccactccactccat

SEQ ID NO: 3658 - DNA, 158 bp, Protomyxzoa rheumatica
cctgcaaaaattgatagacatgacagttatttaaaatttcattggttttgcttgcctccgtgatgtagacagttataagtattgtggtttttgcaattactaaatgaaagacttatttttgcaagttctgagcagaaatagtacatcatttattgtgt

SEQ ID NO: 3659 - DNA, 674 bp, Protomyxzoa rheumatica
cattccattgcactcaggttgattccattccattccattctattcaattccattacactctggttgattcctttccattcaattgctttccactccattccattccattccattccatacgggttgattccattccattgcattccattcctttccattccaaattattccattccattccattcaattccattccgctccactcggtgtaattctattccatcccatcccattccattcgattccgttccatttcattctattccattgcattccattctattcgattccatttaggttgactccattgcattccattcctttcccttccattcttttccattcccttccattccacttttgttgattcattccattccattgcattcctttccattacattccacacgggttgattcctttccattacattccattgcaatccattccattccattccattccaatctaattgattccattccattccattcctttccattccacttgattccattcgattccatttgaacgcattcgaatccattccattcaattccattccatttcattccattgcactctattccattgcattccatgctatgccattgcattccataccattccattacattatattccactcggttggattccaatctattccattc

SEQ ID NO: 3660 - DNA, 320 bp, Protomyxzoa rheumatica
attccattccactcaactccacttcactccaatttgttcaattccattccttcccattccattctattccattaagttcctttccatgtctttccactcctatccactgcattcctttccattgcattccattcctttccattcaactgcattccagttgaatcctctccactctgcacaattccattccattcaattccattccatgccattccactccattccactccactccaatccactcaacaccattacattccattctattctattccattccactccattccatgccattacacgctattcaactccactcc

SEQ ID NO: 3661 - DNA, 134 bp, Protomyxzoa rheumatica
catagaatggaatcgaatagaatcttcattgaatggaatagagtagaatcatagaaaggaatcaaatggaatcatcaatgtttggaatcgaatggaatcatttaatggattcgaatggaatcatggaatggact

SEQ ID NO: 3662 - DNA, 186 bp, Protomyxzoa rheumatica
acaaagcaatttcacagataacttcattctagtttttatctggagatattcagtttttctcattaggcctcaatgggcacgaaaaagtccccaggcagattctccagaaggaaaacttccaacctgctgaattaaaaaaaaaagagtttaactctgtcagacgaatccgcatatcacaaagccatt

SEQ ID NO: 3663 - DNA, 133 bp, Protomyxzoa rheumatica
tggaatggaatggaatagaatggcctcaaattgattagaatagaatggaccctaattgaaaggaatggaatggataggactggaatggaattgaatggagtggaacggcatataatgggatggaacggaatgg

SEQ ID NO: 3664 - DNA, 909 bp, Protomyxzoa rheumatica
ctccactttggtcctctccactcctctctactccactccatgccattccattccactccatgccattccacttctctccaatccacaacactccaatccattccactccactccattctattccattccactccaatccattccattaaactccactccactccactccaccacactccactccattcctttctactccattccactccaccccaccccactgaactccattccactccactccactccagtccactccactccattcctcccctttccattcctttccattccactctactccactgcattccattccactccactccactcaactccattcgagtccattccaatacattccattccactccactccattctactccactagactcctttccactcccgtccacccctttccactccatttcactccattccactctattccactacacttcattccactccaatccattccattccattacaatccaatccactcggttacattccacttcactccattccaatccactcgattcccttcaactccaccccattccattccactcctatgcattctttccattaaactccattccactccattccattccaatcccctccactatattccattcagttccaccccactccactatactccattcatttctaatccattccactccattccattccattctgctccacttagttctattccactccactccattccattccactccattccattccactacactccactccattcaattccattcctttccattccactccattccattccatcactttcttttgacagggtctcactctgtcacacaggctggagtacagtggcacaatctgagctcacatttcatttcacctttc

SEQ ID NO: 3665 - DNA, 229 bp, Protomyxzoa rheumatica
ctagtggaatggaatggaatggaatggagtggaatggacaggaatggaatggattcgaatagaatgaacatgaatggaatggattcaaatgggatggactcgaatggaatgcatttgaatggaatggaattgaatggaatggaatcagatggaatggactggaattgaatggattcatacggagtggactcgaatggaatggactcgaaatgaaaggaatccattgtaa

SEQ ID NO: 3666 - DNA, 262 bp, Protomyxzoa rheumatica
gagtagaatggagtggagtggaatggaatgcaacggaatgcagtggagtggaatggaatggagtggcgtggaatagatttgagtgaaattgaaaggaatggaatggaatgtcatggaatggaatggaatgggtgttgagattgtgccattgtgctacagcctgtgtgacagagggagatcctgtataaagaaaggtgtggatttggatggagtggagaggagtggagtggagtggaatggagaggaacggagtggtgtggag

SEQ ID NO: 3667 - DNA, 819 bp, Protomyxzoa rheumatica
ttccattccattccattctatttcattcctttccgttcaattccattccattctattccatcctttcccattccaatccattccactccactccaatgcactcctctgcaatccattacattcccctccattccattccattgcactccattgcactccactccactccattccactcgactccattccattccattccttgaattccactcaattccattccactccactccacaccactcctctccactcctttacattccactccatcacattccattccactccattccactcaactgcactcaaatccagtccactccactccacaccactccactccactccagtccactccattccactccattccattccactccattcaattccattcctttcttttgacagggtctcactctgtcacccagggtctggtgcagtggcactatctcagctcacatttcatttcccattccattccattgcattccattcaattgcattccattccattatatttctttcaattccattccatcccattccattccactcctatgcactccaatccactccactccattgtactccattccattcctttcaattccattccactccaccccactccattctgctccactccattccattccatcccattccattccactatactgcactccactcaactgcactccactccacttcattccattccattccactcctttccttcgacaggatctcactctgtaacccaggctggagcgcattggcacaatctcagctcatatttcatttcatcattccatt

SEQ ID NO: 3668 - DNA, 141 bp, Protomyxzoa rheumatica
agtggagtggaatggaatgcagtggaatggaactgaagggaatagaactgaacggaatggaaaggagtggagtggatttgagttgattggagtggttcagagtgcagtcgaatggaatggaatagaatggagtggagtgga

SEQ ID NO: 3669 - DNA, 224 bp, Protomyxzoa rheumatica
cattccgctccattcaattcgcttccattccattcgattgcattccatgctatctcataccatttcattccattcaattcgaataaattcctttcaagaccattccttttgggtccattctatttgagtccattccattcgattccattacatttgggtcctttccattccattccattcgatgccattccattccattctattccattcgagtccattccatt

SEQ ID NO: 3670 - DNA, 175 bp, Protomyxzoa rheumatica
attgcattgtagtccattccattcgagtccattgctttcctgtccactacattcgagtcaattccatatgagtctattccattccatttcttttcattcgatatctttccattccattccattccagtccattcctttccattccattcgtttccattccattcgatttcatttc

SEQ ID NO: 3671 - DNA, 311 bp, Protomyxzoa rheumatica
tgaagatgactctattcgaatccatttgatgattccacttgattccattaaatgtctccgttcaatcccattcaatgattcccttcgattccattagatgatcattccatttgattcaattcagtgattccattcgattccatttgatgatgattctattcgtgcccattaggtgatttcacacgattccattgtatgatgattccattcgattccattcgatgatgagtccattcaattccattcattgttgattccattcaattccattcattgatcccattcctttccattcgacaatgattccattc

SEQ ID NO: 3672 - DNA, 131 bp, Protomyxzoa rheumatica
gtgaatttgagaggagtggggtggaatggaatggaatggaatgcggtggaattcaatagaatgaagtgtagtggagtgaagtgcactggagtggaatagaatgatatgacaaggaatggaattgaacagag

SEQ ID NO: 3673 - DNA, 134 bp, Protomyxzoa rheumatica
aaatccattccattctattccactccaatccactgcactccattcctttgcaatccattcaactccattccattgaattgccctcaactccaatccattccgttccactcctttcctttccaatccgttccctt

SEQ ID NO: 3674 - DNA, 134 bp, Protomyxzoa rheumatica
tccactccattccattgcattccactccacttaatgccactcttctctgttcaattccattctttcccattccaatccattgcattccactctactccactccacactgctcctttcaattccattctttccca

SEQ ID NO: 3675 - DNA, 285 bp, Protomyxzoa rheumatica
tgattcagcaggatggaaacactcactttggaaaatctgtgaaggaaaattgaaaagccttttgaggcctatagaaaaataaatatccccagaaaaaactagaaagaagcaatctgtgaagctgcgttgagatgtgctgctcatctcacaaaattaaagttttcttttcattcagtaggctggagttactctaattgaggaaatattcaatggacatttgggagtccattgtggcttaggggaaaaaccaaatatcgccagataaacactagaaagaagctatct

SEQ ID NO: 3676 - DNA, 146 bp, Protomyxzoa rheumatica
cattccattccattccattcctctccattccattccattccattcccttccattcctttccattctattctgttccattcgagtccattcctttctagtccataccactccattccattcgagtccattccttttgagtccattcc

SEQ ID NO: 3677 - DNA, 296 bp, Protomyxzoa rheumatica
tggaatgcaatcgaatggaatggaatcgaatggaatggaatcaaaaggaatggactggaatgaaatagaatggaatggaatggactcgattggaatggactggaatggaatagactcaaaaggaatggactcaaatggaatgcaatcgactgcaatggaactgaatggagtggaatcgaacggaatggtattgaatggaatggactctaatggaatgcaatagaatcgaaaggacactaatggaatgaactggaatggaccggtctcgaatggaatggaaaggaatggaatggact

SEQ ID NO: 3678 - DNA, 187 bp, Protomyxzoa rheumatica
ttgatttcattccattccatttcattccattcctttcttttccattccattccactaggtttgtttccattccattccattacattctatttctttccattccattcccttccaatccattacgttacattacattacattcaactcggtttgattcaattccatccattccattccattccctttc

SEQ ID NO: 3679 - DNA, 206 bp, Protomyxzoa rheumatica
aatggagtggagtggaatggtgtgtattggaatagagtgcaatggtttgaaacggagtggagtggaatggagtggagaggaattgaatggagtggaatcgaacggaataaaacagaatgtaatggaattgaatggaacagagtggagtggagtagaatagagtggaacggaatggaacaaaatgtaacggaattgaaaggaacaga

SEQ ID NO: 3680 - DNA, 139 bp, Protomyxzoa rheumatica
tatgtggaaaaatacaatatgtgatgtttggattcatgtcagagaattaaatcttcctttagactcagttggttgggaacattgtctttgcaaaatgtgtgaaggaaaattttggatcccattgaggcctatggggaaa

SEQ ID NO: 3681 - DNA, 152 bp, Protomyxzoa rheumatica
aaattccagtccaatccactccactgcattacattccactccaatccattgcactccactcctctcttctgcattccactccattcaattcttttccattctattcctttgtattcccctccactccactccattccgctccactccactcc

SEQ ID NO: 3682 - DNA, 182 bp, Protomyxzoa rheumatica
tccattcgagtccattccattccatttgactcaggtacattgattacattccattcctttcgaatatattccattctattcctttcaagtctattccattccatttcattagattccatttcattaaattccattttaatctattcgagatcattccattccattccgttcccttcatgtcc

SEQ ID NO: 3683 - DNA, 387 bp, Protomyxzoa rheumatica
cattccattccattccactccactccatttcactccactccactccattccactccactcaactccactacactcctctgcattccactccattccattccattccactccattccactgcactccactcgactccactgaatcacctttcactcctttctttcgacacaacctctgtctgtcacacaggctgtagcacagtggcacaatctcagcatccattctgttccgtttggttctttccattcatttccatactattccactcggctccactctattacatcctattacattcgactccattccgctcctctccactccactgcactccattccactccattccactgcattcctctccactccactccactgcactccatt

SEQ ID NO: 3684 - DNA, 394 bp, Protomyxzoa rheumatica
ctccactccattccattccattccattccactcaactccactccactaaactccaacccaccccattacactcctttctttcgacatgatttacctctgtcacacaggctgtagcacagttgcacaatctctgcaccaattccattccaatccattccattccattctattaccttctatttctatccattcaactcaactgcactcctcaccactccattccattccactcctttccattccattcccctccactccactccaatccattgctctccactccactccattccactccattccattccaatccactctagttcattccactcctttccagtaaattccactctactccgttgaattccattccactccactccattccattcca

SEQ ID NO: 3685 - DNA, 186 bp, Protomyxzoa rheumatica
ttccattccattccatttcattccaatcgagtacactccaattacttccattccaccctattcctttccactccattccactttggtccattccacttcaccgcatgccatttgattccattcgattccattccactccattccattcgattttattccattcgattccattccatttgagtccat

SEQ ID NO: 3686 - DNA, 169 bp, Protomyxzoa rheumatica
tccaatccattccatatgatttaattacatttgagtccattccattccagtaaattccattcctgtccagtacatacgacccaattcccaaggagacctttccattccatttgattccattccatttagttccattccattccatttcattcgattccattccattcga

SEQ ID NO: 3687 - DNA, 253 bp, Protomyxzoa rheumatica
cgcgtcaccagaaacctcaagaaatcatagtcgagacggccacctgcatcctcaatcaccgctatcaaatcggaggtcataagcaggaactggctcatggacgccacatccaccatcgggggatggactgtcacaatcattcccgttgcggcgttgagcgcacccatcgtcagaaagccaagctgcggggggcagtcgatcacaacgacatcgtagtcatcgtcaacctcggcgatcgctcgggccaccctcc

SEQ ID NO: 3688 - DNA, 159 bp, Protomyxzoa rheumatica
cagattataggaaaacagtgtttccaaaccactcagtcaaaataaaagtttaactctgtgagaaaaatgcatacattgcaaggcagtttctcatagagcctcattctactttttatccaaagatatttcccatttcactgtattcatcagtgctctccc

SEQ ID NO: 3689 - DNA, 297 bp, Protomyxzoa rheumatica
ggaatggagtggagtggggtggaatggagtagagtggaatgaagtagaatgcagtagatcagagtgcagtggaaaggaatggaatggaatagagtggaatggaatggaatcaaccagagtggactggaatgagatggagtggaaagtaatggaatggaatggaatcgagtggaatggaatggaagggaatcaacaggaaaggaatgcaatggaatggcatgaaagggaatggtgttgaatggaatggaatggattgcaatggataggaatgtaatggaatggaatggaatcaacccg

SEQ ID NO: 3690 - DNA, 146 bp, Protomyxzoa rheumatica
aatccacacgtcacaaagcagtctcatggataacttcattctagttttcatctgggaatattcatttttttccccttggccttaatgggcacctaaatatcccttggagagtctccaaagacagtgtttccaacctgctgattcaa

SEQ ID NO: 3691 - DNA, 230 bp, Protomyxzoa rheumatica
actggattggaatggaatggaatgaaatgaaatgggtgctaagactgtgccactgcactacagcctgtgtgacagacggagaggtcgttgaaagaaaggcatggaaggggatggagtggagtggaatggagtggagaggaggggattggagtggaatggagtggagaggagtggagtggagtgaagtggtgtggagtggagtggagtggaatggagtggaatggaatgca

SEQ ID NO: 3692 - DNA, 138 bp, Protomyxzoa rheumatica
ctccattccaatacattccattcctttcctttcctttcctttgcactctgatccactcctgaactccactccactccactctgttccttgccattccattccgttccattcctttccactgcattccattccactcca

SEQ ID NO: 3693 - DNA, 460 bp, Protomyxzoa rheumatica
gtattcgattacatttgatgccattcgattccattccatttgattccattccattcgatcccattctatttgatccctttccattcaatcccattccattcaattccattgcattctattccattccatttgattccatacatttgagtctactccattggagtccattccattccatcacattccattcgaatccattccattcttttccattccattcgaatctagtccattccattcgagtccactccatttcaattcatttatttccagtccattccttttcattccattcaagtccgttccattctagtccattccacttgagtccaattcatttgagttcattcctttccattctattccattcatctcctttccattcgattccactccgttcaattgctttccattcgattgctttccactcgattccattccattcgagtccattcgtttt

SEQ ID NO: 3694 - DNA, 552 bp, Protomyxzoa rheumatica
attccactccagtccactcaactccactccactccattcccttccattccaatgcactccaatcctctcctatacactccattccatccaaatccattccactccatttcactccactccactccactccgatactttccattacaacacagtacattccactccattccactccactcaactccactgtattgcattccattcaattccaatacactccattacactactttcctatccttctacaggatctcactctgtcacccaggctggagtgaagtggcacaatctcagctcacatttcatttcaccagtacttcccattccattccgtttcgttccattctgatctactccgttccactgcactacattccactcccttccactacactccactcaactccagtccactccacatcactacactccatcccattccattccactcctttccattccactgcactccactccattccattacattgcatcccattagattccattccatgccacaccattccactccactccactccattccattcc

SEQ ID NO: 3695 - DNA, 263 bp, Protomyxzoa rheumatica
gaatccattcaatgatgattctagtcgagtcttttgaatgattccattagattaaattgaatgatgattccattcgagtccattccatgattccattagattccatttgatgattattccattcagtttcatttgatgaaactatttgataccattcgatgatgattcccttctattccattcgatgattccattcgatttcattctatgatgatttcattgtaatccgtttgatgattccattccattacattcaatgatga

SEQ ID NO: 3696 - DNA, 1509 bp, Protomyxzoa rheumatica
aaatggaatcgaatcaaataaaatgcaatggaatggaatggaatgaaatggaacggaaaggaactgattgaaaacaaactgaatggaatagaatggaatccaaaggattcgaatggaatggaatggaatgaaatggaattgaatggaatggaaaggaatggaatcgattcgaatggaatggaatggcatggaatggaatcgaataaaatggaatgaaattgaatggaatgggatggaatgaagtggactggaaaggattcgaaaagaatggactggaattgagtggaactgtatggaatggaacggactcgaatggaatggaatcgaatgaaatggagtcgaattgaatgtgtccaactcgaacgctgtccagtgtaatgtaatgggatggaagggaatggaatttaatgcaatggaaagactagaatggaataaaatggaatggaatggaatggaatagaatgtaatggactgcaatggaatggactcgaatggaatgcactagagtacaaaggaattgaatgcaatttaatcgaatggaatgaaatccaatggaatggaatggaatgcaatgcattggaacagactggaatgtaatgtactcgaatggaattcacacgaatggaatgaaattgaatgcaatcgatgcgaatggaatggaatcaaattgaatggaatggaatggaatggaatggaatagattataatggaaaagaatagaatggaatggaatggagttgaatggactcgaatcgaatggactcaaagggaatggaatggaacataatacaatggaaaggaatggaattgactcgaatggaatagaatgaagtggaatggaatggaattgatcgcaatggattccaatggaatggaaaggaaagaaatggaatggaattgaatggaatgcccggaaatcaattggaatggaatggcatgtaatggaatctaatggaatcgaattaaatggaaaagaatcgaatgaaatggaaaggaattgaatagaatggatttgaatggaatggaatggaatttaatataatggaatggactggaaatgaatggaagcgaatggaatggaatcgaatggaatggactcgaatggaatggaatggaatggaatcgtctcaagtggaatggaatggaatagaatggaatggaatcgaatgaaactgaatggaatttaacggaattgaatggaatggaatggaatcgaatagaagggaaccaaatggaatggtgtgtaattgaatgaagtagaatggaatggactccaatggaatgaactcgaatggattggaatgaaatggaatggaatgttatagaacggaatcgaatggagtcaaatggaatggaatggattggaatggaatggaatggaatagaatcaaatggaatggaatcaattggaatgcagtggaatgaaatggaatgtttgggaatggaatggattggggtctagtagagtcgagtggagtggaatggaatggaatggaaaggagtggagtg

SEQ ID NO: 3697 - DNA, 175 bp, Protomyxzoa rheumatica
cttttctaccttaggcctcaaagctctcaaaatatacacttgcaaatactgcaaaaagagcgtttcaaaacttatctatcaaaagaaagattaaactctgtaagctgaatgcacacttcacaaattagtttctgagaatcattccatctagtttatctatgaagatattgctttt

SEQ ID NO: 3698 - DNA, 152 bp, Protomyxzoa rheumatica
tctatgaaaatatttccttttctatgataggcctcatacggcgctaaatatccacatggaaatagcaaaaaaaaaaaaaagtttcaaaactgctctatcaaaagggaaggtcaacactgtgagctgaatgcacacatcgcaaggaagtttct

SEQ ID NO: 3699 - DNA, 271 bp, Protomyxzoa rheumatica
atatccctttgcagattctcaaaaaactgtttccatactggtgaatgaatagaaggattaaactctgcgaggtgaatacactcatcagatagtggtttcttaggtagcttccttctggtttttatcatggggcatgctcttttttgccattgtcctcaaagacctcccaattgtccatttgctgaatggaccaaaaaagtgtttacaaactgctgaatgaaaataaaattttagctctgcaaaatgaatgcacatatctgaaagcagtttc

SEQ ID NO: 3700 - DNA, 428 bp, Protomyxzoa rheumatica
tttctgttccattccaatcctttccattccattccattacattctattccttttcattttattcaattccattccattccactccattccactccactccaaccactccactccattccactccattgcattgcactccactccattccactccactccactgcacatcactccattccattccattcaattgcattacccaccactccatttcactccactccattccactccattccattccattgcattcctctccactccactcctctctgttcaattctattccttctcattccattccatttcaatccagtttgattccgttgcatttgattccattccattccagtccattccattatagtagcttccatgcggttcctttcctttcgagtctattccattccattccattccattccctt

SEQ ID NO: 3701 - DNA, 128 bp, Protomyxzoa rheumatica
ctgctttgtgatgtgtgggttgatccaacaaagttcaatgtttcttttgattcagcaggttttaaatgccctttttgttgagtctgcaaaagaacttttgagagcccattgaggcctatggagaaaaa

SEQ ID NO: 3702 - DNA, 187 bp, Protomyxzoa rheumatica
ggagtggagtggagtggaatggattggagtggcattgaaaggaatcgaatggattgtaatggaatgaagtggtgtggaatggaatggactggagtggaatggaatggaattcaatggagaagactggagtgaagtggagtgaagtggagtgtagtggaatggagtggaggggagtcgagtggagtgg

SEQ ID NO: 3703 - DNA, 273 bp, Protomyxzoa rheumatica
atcgaaagaaatggaatagaatggaatggaatcaaatgaaaggtactggaatggaaagtattcgaatggaatggagaggaacaaaacgggatcgaacggattggaatcgaatggaacggaatggaatggaatggaatggactcgaaaggaatgcagtcgaatggaatggaatcaaatggaatggaatagaaaggaatggaattcattggaatcgaaagcaatagaaaggaatcgagagtaatagaaatatatcgaatggaatggaatggaatg

SEQ ID NO: 3704 - DNA, 205 bp, Protomyxzoa rheumatica
ttagagtccattcaatcattctgttagattccgttcaatgatgataccattgaagtgaattcgatgtttccatttgagtccatttgataattccatatgaatccattcgatgattgctttcaattccatttgacgatgattccattcgagtcaattcgattattccattcgattccatttgatgatgattgaattcgattccatt

SEQ ID NO: 3705 - DNA, 165 bp, Protomyxzoa rheumatica
gaatagaatggagtggagtggaatgcagtggagtccaatagatggtagtggagtgtaatggaacggagtggagtggaaagaattggtttgaagtgtagtggagtggagtggaatggaacggaaatgagtggagtggagtatagtgaagtggaatggaatggaatg

SEQ ID NO: 3706 - DNA, 164 bp, Protomyxzoa rheumatica
tgaaatataatggaatgaaatgcactttaatgaaatggaatataatggtatggaatgaaatggaatggaatggacttgaatgttatggaatgcaattgaatggactcgaaaagaatggattggaacggaatgaaatggagtggaatgcaatggactcgaaagga

SEQ ID NO: 3707 - DNA, 135 bp, Protomyxzoa rheumatica
tggcctgcatttgatgatgattctatttgatttcatttgacgatgatggcattccataccattctatgatttcatttgattccattggatgaggattccattggagtccatttgattattccattcgattccatt

SEQ ID NO: 3708 - DNA, 448 bp, Protomyxzoa rheumatica
atggaatgcaatcgaatggaatggaatggaatggaaaggaatcgactggaatagaatctactagaatggaatggaatggaatggaatggattcgattggagtggacaggaatggaatggactagaatggaatgaactcaaaaagaaagaaatggaatggaatggaatagaacagaatgtaatgggatcgaatggaatggaatctaatgaaatgcaatcgaacggaatgcaatagaatggaaaggaatggaatggaatagaaacgaatggaatggaattgagtgaaatggattctaatgtaatagaattgaattgattggaatgcaatggaatggaaaggactcgaatgtagtagactggaatggaatggactcgaatgaaatggactggaagggaatgagctcgattggaatgcaaacgaatggaatagaatcgaatgtaatgaaatc

SEQ ID NO: 3709 - DNA, 354 bp, Protomyxzoa rheumatica
tggcacaatctcagctcacatttcatttcaccattccattgcattccattccattccatttaattacaatccttaccactcaaccccactccattccacgccattccattccattacattacatttcagtaaattccattccagtccactccactctgctacattccattcaattccatcccatcccattccactccattccattcctctccactctactccactccactcatctccattccattccactccattccattccattcctttctttcgacaacatctcactctgtcacccaggctggactgcagtcgcacaatcacagctcacatttaatttcaccattccattcc

SEQ ID NO: 3710 - DNA, 419 bp, Protomyxzoa rheumatica
ggaatggaatggaatggattggaatggaacacaatggaacagaatgcaatggaatggaatggagtggagtggagtggaatgaaatgcaatggaatggaatggagtggagtggagtatactggaatataatgtaatggaatggaatggaatagaatggactcctatagaatggactctaatggaatagaatcatatgtaatggagtcaaatggaataaattcaaatggaatgcaatcgagtggaatggaatctaatggcatggaacagaatcgaaaggaaagtggtgaaatggagtcgagtaaagagaaatggagtggaatgtaatggggtgtagcagaattgaatggagtggagtggagtggaatagactggaatggattttaaagggaaagtacagaaatgaaaggagtggtgtggag

SEQ ID NO: 3711 - DNA, 138 bp, Protomyxzoa rheumatica
tgctttgtgatgtgtgcgttcaactcagagcattcaaacttccttttcggagagcagttttgaaacagtttttttgagttacctgcaagtgcatatttggagcggtttaaggcctatggtggaaagggaaataccttc

SEQ ID NO: 3712 - DNA, 274 bp, Protomyxzoa rheumatica
tccattccactccactccactccattccattccattccacgccactccattttattcccttcaacagcatttcattccactccattccattctactcggtgccactccaagccagtccattttactccactccattccattccattccactccaccccactccattcgacccctctcctctacactccactctactccactccactccattccattccagtcctttccactccactctactccattcctttcaactccattccattcctcacct

SEQ ID NO: 3713 - DNA, 230 bp, Protomyxzoa rheumatica
ccagccttcagcaaccaccactgtgatcagtcagcaggcatcaacatccaggcaagaccctttaccaataaaaaagatttcaacttgctgaaagctcaggtgatcattagtatttttagcaatcaggtatttttaaattaaggcaggtacactgttttttagacacaatacaattgcaccctcatttactgcattatagtgtaaacataacttgtaaacgcactgaaaaa

SEQ ID NO: 3714 - DNA, 147 bp, Protomyxzoa rheumatica
ggaatgcaatggagtggggtggaggggaatggaattgagtggagtggaatagaagggaatggaatagaatatcgtggagtgaagtggagtgaggtcgactggatggtaattgaaaggaatggaatgcaatggaatggaacgtagtgg

SEQ ID NO: 3715 - DNA, 243 bp, Protomyxzoa rheumatica
ctccactccatttcatttcattccattccattcctctccactccactcctttccacttcactccattccattccataacattacaatgcattccactccattccaatgcactccactccactcatctccgtttcatttcattccaaaccattccactccattccaccccgttccattgcataccatttcattacattccactccacagcatttcattcaactacattccaccccattgcattg

SEQ ID NO: 3716 - DNA, 190 bp, Protomyxzoa rheumatica
ttctttttgagtgcattccattccaatccattccattcgattccattctttttgagtgcattccattccaatccattccattcgagtacattctattccagtccattccattctttccattcaataggagtgttttccattctattaaattccatttgagtccattccattccagtccattcaattccag

SEQ ID NO: 3717 - DNA, 368 bp, Protomyxzoa rheumatica
gaatagaatggaatggaatagaatggaatggagttgagtggaatggagtgtaattgagtgcagtggagggtaattgagtgtaatggagtgcagtggagtggtgtggaaaggagtggagtggagtggaatggtgtagtgcggaatggaatggagggtaatggaatgcattggaaaggacaggagtggcatggaatggaatggagtggaatggaattgaatggaatggagtggagtggagtgaagtggtgtggagtggaacggaggggaatggaatggattggtgtggaatggaatggaacagaatgtcgcagtgtggagtggaatggaatggagtgaagttgaacagaatagaatgcaaatgagtggag

SEQ ID NO: 3718 - DNA, 368 bp, Protomyxzoa rheumatica
tgcaaagaaatggaacggagtggagcggaatggaatggaaaggaatggattggaaagaaatggaatggggtgaagtggaatggaatggaatggaatggagtggaatagaatgaaatggaatggagtgtggtggagtggaatggaattgagtggagttgaaaagatttgaatgtaatggaatggagtggagtggagcggtgtcgcgttgcatataatggaatggagtggagtgatatggaatggaattcaatacaatggaatggaatggaacttagtggaatggaattgagtggaatggaacggaagggagtatagtggaatggaattgaacgcaaacgaacggaaaggaatggaatggaatgggatgg

SEQ ID NO: 3719 - DNA, 145 bp, Protomyxzoa rheumatica
aatggaatggaatggaatggagtgtagtggaatggaggggagtgcagtttaaaggaatagaatggaattgaatggaatggaagggagaggagtggagtggagtgggaaggaatggagacgaatgtagtgtagtggagtggattgg

SEQ ID NO: 3720 - DNA, 258 bp, Protomyxzoa rheumatica
aatggactcgaattgaatggattcaaatggaatagaatagaatgcaatgccattgaatggattggaatggaatggaatagaatggatccaaacttaatggattcaaatggaatgtactcaaatagaatggacttgaaaggaatgggctcgaaagtaatggactggaaaaaaatggatttgatcagattggaatagaacagaatggaatggagtggaatggattggaatgggatcgaatggaatggagtcaaatggaac

SEQ ID NO: 3721 - DNA, 255 bp, Protomyxzoa rheumatica
atattcgcgtggagtggtattgaagggaatggaatccaatggaatgggatcaaatggaaaggaatcaaatggcatcaaatggtatcaaaccgaatgtcgtgaagtggaggggagtggaatggtttggaatggaatagggtgcaacggaattgcatggagtggacaggagtggaagggagtagaatggaatagattgggaaggaatggaattgaaaggagtgtactagagatgagtgcagtgcaatggaatggagt

SEQ ID NO: 3722 - DNA, 399 bp, Protomyxzoa rheumatica
actgactccactctgttccattccactccattccatgacaccccactacactccattcctttccattgcattacactccacgccacttcactcctctcctctcaattccattacattgcattaaactccactgcacaccactgcattcctttcggttccattgcattaccctacactgaactccactccacactgttcaattccattccttcccattacattccactgcactccattccactccactccaatccattcagttacattctcccccattccattccactccattccacttcactccacttcaccatattccattcgattcctttcgattccattcaatgccgttcggttccattccatttgattccattcaattccattccattccattcc

SEQ ID NO: 3723 - DNA, 157 bp, Protomyxzoa rheumatica
attccattccactaaattccatttcattcgagtccattccactgcactctgatcctttcaactcaactccactacactacactccattccgttcccttcaattccattccgttgcattccattccattctgttccattccattccattccactccac

SEQ ID NO: 3724 - DNA, 141 bp, Protomyxzoa rheumatica
tccattccattgctttccagcacatttcattccattacattcccttccattagggtttattccattccgacatattccgttcccttcgagtccgttcaatggcattccattccaggcgattccatttcactccattccatt

SEQ ID NO: 3725 - DNA, 169 bp, Protomyxzoa rheumatica
cccaattgcattgcactccattccactccattccacttcaccacattccagtccattccttttgataacatttgattccataccattcgattccattccgtttgattccattacttttgattctattccagttgactccattcaattccagtctgttccactccattcc

SEQ ID NO: 3726 - DNA, 192 bp, Protomyxzoa rheumatica
ttccattccacccattcccttccaatccattcccctccactccactccacatcaccacattctgttcctttcgaatacattcccttcagttaaattccattcgattccattccattcgagtacaatccatttgagtcttttcctttggattactttcgtttccagtcaattctattccagttcattccattt

SEQ ID NO: 3727 - DNA, 137 bp, Protomyxzoa rheumatica
tggagtggaatggaatgtagtggagtggagtgcattacattgtagagaagtggaatggattggacttgagtgaaatggagtggagtggagtggtgtggaatcaaaaggaatggagttgaatgaaatgaaatggaaca

SEQ ID NO: 3728 - DNA, 150 bp, Protomyxzoa rheumatica
tggaatggactcgaaaggaaagcagcggaatggaatggattcgaatgcagtggagtagaatgaactcgagtggtaaggtacggaattgaaaggactcgaatggaatgcaatgtgaaggaatgaaatcgagtcgaatggaatggaatggaa

SEQ ID NO: 3729 - DNA, 303 bp, Protomyxzoa rheumatica
tcactccactccattccactacactccattccgctccgcttcacttcactccagtcaattccaatgcactgcattcctttccgtcccactccactccactccattccactacacaccattctactccatgccactccactccattccattccatcccactgcattccattccattccaatctattcaactccactccactccgtgccattccagtccaatcaattccattgcattccaatctactctcttacattccacacctctacactccattccactccatgccactccattcaattcca

SEQ ID NO: 3730 - DNA, 373 bp, Protomyxzoa rheumatica
catccgattccattccattctattcctttccattccattcttttcccttccattcgagtccattccactgcagtccatttctttcgagtccattccattccattctattccattcgtgtccattccattgcattcgatatctttccgttaaactccattaaattctatcctttcgattccattcaattccattccatttgattccattccattgaattcccttccattcgactgcattccattggaggccagtgcattccattacacttgattccattccgttcgattccatttttttccagtccattcctttcaagtccattccattccagtctattccaatcgattccaagcctttcgattccattccatt

SEQ ID NO: 3731 - DNA, 164 bp, Protomyxzoa rheumatica
cactcggaatgattccattccattacattccattccattgtattccatttctttccactccattccattccattccattcgggttgattctaaccaattcctttacactctattgcattccattccgcacaattccattccattctattccactccaattggtt

SEQ ID NO: 3732 - DNA, 167 bp, Protomyxzoa rheumatica
tagattgcagtccaatatattagagtccgttctattccagtccattccattccggtccattccattccaaagtattgcgttccatttgattccgttctatttgcatatattccattcgagaccattcccttcgtgtccattccatttgagtccattccacttgagtc

SEQ ID NO: 3733 - DNA, 178 bp, Protomyxzoa rheumatica
ccaaaaccaaaaccccccaaaacaaaacaaaacaaaacaaaacactatgctggagaatatgcaaatgagcatttggaagcccattgatgtctattattgaaatgcaaatattcccagataaaaactaaaaagatgctatctgtgaaagtgtgttttgatgtgtaaatgcatctcatag

SEQ ID NO: 3734 - DNA, 162 bp, Protomyxzoa rheumatica
cagacaagcactataaagaagataactctgaaactgctttatgttgcttggactcatcacacagagttaaaactttcttttgatccagcaggtaggaaacactcttgtagaatcactgaaaggacagtttggaagccattgaaacctaacaacaacaacaac

SEQ ID NO: 3735 - DNA, 188 bp, Protomyxzoa rheumatica
gcatactgataagaagggtgggctcccaaggccttggacagctctaccactgtggcttttcagggtttagcccctaaagctgctctcaaaggctggagaggagtgctcgtggctattccacgcacagggtgcaagctgtcagtgactctacattctgaagtctagaggacgatggcccccttctcata

SEQ ID NO: 3736 - DNA, 137 bp, Protomyxzoa rheumatica
ttgattccattccattcgaatccatctaattccattctactggctttgattccattacattccattccaatgcattccagtccattccactcgggtagattatatttcattgcattccattccattccgttccattc

SEQ ID NO: 3737 - DNA, 129 bp, Protomyxzoa rheumatica
atggaatggactcgaatggaatggtatggaattgaggcgactggaattgaaggaaatggacctaaatggaatggaatggactctaattgaacacaatggaatgacttgggctcaaatggaatggaatgg

SEQ ID NO: 3738 - DNA, 200 bp, Protomyxzoa rheumatica
ttgaatggaatcgaatggaatagaatggaatgtaatagaatcaaatgacatcaaatagcatcaaatgggttcgaatggaatgccgtgatgtggagtggagtggaattgagttgaatgaaatggggtagaatggaattgaatggagtagcttgaagtggagtggaatggattggaatggaatggaatgggaaggaatggaa

SEQ ID NO: 3739 - DNA, 136 bp, Protomyxzoa rheumatica
ggagtggagtggaatgcagtggattggagtggaatggaaaggagaggagtggaatggaatggagtggagtggtatggagtggcgtgcagtggactggagtggattgaaagagaatggaatggaatggaatggaatg

SEQ ID NO: 3740 - DNA, 139 bp, Protomyxzoa rheumatica
ccattccactccattccattccactccattccattccactgcattcctttccatatcgttgcattacactgcactccactcgactccattccactatattccattctgttccactccattcctcttcactagactccac

SEQ ID NO: 3741 - DNA, 159 bp, Protomyxzoa rheumatica
ggaatggaacggaatggacttgaatggaatctaattgaattcaatggacccgaaaggaacggaatggtgtgcaatggaatggacttgaatggtatggaaagaattggacatgaatggaattggatacaatggaataaaattgaatgcaatggaatggaa

SEQ ID NO: 3742 - DNA, 224 bp, Protomyxzoa rheumatica
attccattcgattctattcgatgccaatcgattcctttccattcaattccatttcttttggttccattccattcgactccattccattcaattccattccactccattccattcgattccattccaatagattgcattccatttgattccattctattctagtatactccattccagtcctttccattccagtccattatattcgggtccattccattcgagtc

SEQ ID NO: 3743 - DNA, 142 bp, Protomyxzoa rheumatica
atggaatggactctaatggaagagagtggattggaatggactcgaatggaatggtttagattcgaacggtgtggagacgaatggattcgaatggaatggactggaatggaatggaatgaacacgagtggaatgcaacggaat

SEQ ID NO: 3744 - DNA, 191 bp, Protomyxzoa rheumatica
aaacggagtggagtgtagtggattggaatgcaaaggaacggaatggaatggaatggaaaggagaagagttgactgtagtggaatttaatggagtggaatatagcggagtggagtagattggaaaggaatgtagtggaatggaacacaaaggagtggaatggaatgcaatggaatgtaatgtaatggaatgg

SEQ ID NO: 3745 - DNA, 141 bp, Protomyxzoa rheumatica
aatggaatggaatcgaatggaatggaatcaaatggaatggaatccaatggattggaatcgaatggcgtggaatgaaattgaatggaaagtggtgaagtagagtatagtggagtggaatggattggaattgaatggaatgga

SEQ ID NO: 3746 - DNA, 196 bp, Protomyxzoa rheumatica
aacttgcagaggttgtgtttaatctgtagatcaaattggagagaactaacatcttaacagtcagttttctgctccacgaacatagtatgtcttttcatttatttataaaggaaatgaccttgatttctttcattggtgttttaagttatttgtgacatacagatcctgaacatattttattagatgtatacttatg

SEQ ID NO: 3747 - DNA, 265 bp, Protomyxzoa rheumatica
aatggattggagtggagtggaatgtaatggaatggaaaggaatggagtggaatcgaatggactcgagtggaataaactcgaatggaatggactcgtgtagaatggacgcgaatggaatggaatcgagtggaatggactcgattcgaaaggactaatggaatggactacaatggaatggaatagaatgtaatgaaatggaatggaatagtatggaatagaatggactcgaatggaatggactggaatggaatggattcgaatggaa

SEQ ID NO: 3748 - DNA, 391 bp, Protomyxzoa rheumatica
cattctattccactccactccactccattccagtttattcttttccattcctctccactccattcgattatattccattcctttccattccattcttttcaaattatattccattccactgcattccaccacattccattccgttcctttccattccattccattccattccactccactaaattccatcccattccactgcactctgatcctctccagtcaaatccactcctctccactccactacattccgtttttttgaattccattctattccattccattccgtttcaatccatttcattccatgccactccactccattccattcctctccattccactccacttcactccactccactccactccattccattccattccattc

SEQ ID NO: 3749 - DNA, 186 bp, Protomyxzoa rheumatica
taactcttgtctgccctctgtccaacggggcattgtgaattatctctgcactgataacccaggtgattcaactcttcactaggaactgtctacagaggttattgtgatatatctctgcactgataaactaggtggtgtaactcttctccaagctctgcctacaggggcgtttccacatatccctga

SEQ ID NO: 3750 - DNA, 180 bp, Protomyxzoa rheumatica
gaatagaatgcaatgcactcaaaaggattggagaggaatggagtggactcgaatggaatggattgtaatggtatcaaatgaaaagaattggaattgaaagcaatcgaatttaatagaatataacggaatgcaatggactcaaatataatggaatgtaatggaatgaaatttactcgaatg

SEQ ID NO: 3751 - DNA, 328 bp, Protomyxzoa rheumatica
aggccacaaagaggaccaaatatccacttggagattcaacaaaaagtgtttttcaaaactgctccttcaagaggaatattcaactctgagagttgaagccatgtatcacaaagtagttaccgacaatgcttctgtctagattttatgtgaagacattcccttttgtaccagaggcctgaaagcactctaaagatagaatagcaaattccacaaaaagagggtttaaaaccgctctatccaacgaaaggttaaactctgtcagctgaatgcgcacatctcagagtagcttcagagaacaattatgtctagtctttctgggaagatattt

SEQ ID NO: 3752 - DNA, 161 bp, Protomyxzoa rheumatica
gtctgcaaaaaatgctattggtattttaatatacattgtgttaaatctgtagattactttgggtaatatggtcatgttaacaatgtttttcaatccataaacatgggatttttcatttatttgcattctccttaatttctattatcaatgttttatatttc

SEQ ID NO: 3753 - DNA, 140 bp, Protomyxzoa rheumatica
cacacatcacaaagcagtttctgagagtgcttgactactttttatgtgttgacattcccggttccaacgaaggattcaatgcactctaaatatccatttacagatgctacgacaggagtgtctgaaatctgctctatgaa

SEQ ID NO: 3754 - DNA, 154 bp, Protomyxzoa rheumatica
aagaaagatttaccactttgcaatgaatccaaacatcacaaaacagtttcaaaaataacattttctttgtttttatctggggatattcacttttacccataggcctcaattggcttccaaatttcccttcacagattttcgaaaaagagtgtgt

SEQ ID NO: 3755 - DNA, 130 bp, Protomyxzoa rheumatica
aatccgttcatttccattttgttccagtcagttccactccgttcgattcaattcctctcgattccactctgttccattctattgcattgcattctattcccttccattgcattccattcctttccatttg

SEQ ID NO: 3756 - DNA, 127 bp, Protomyxzoa rheumatica
tttgattccagtccattcgaatccattcctttcaagtccattccattgcagtacattgcatttgattccattacattccagtccattccgttgcagtccattacatttgagtgcaatccattcaagt

SEQ ID NO: 3757 - DNA, 131 bp, Protomyxzoa rheumatica
tgattccattcaattccattctattctattcgattcgctttgattcgtttccatgtcattccatgcgataccatgcgattcctttccattccactaaattccattctattccattccactccactccattc

SEQ ID NO: 3758 - DNA, 261 bp, Protomyxzoa rheumatica
atctagggatattcactttttactcataagcctcaatgactcccaaaagtttccttgcagattcttcaaaatgtctgtttccaacctcccgaatcaaaacaaagttttacgtctgtgtgatgaatccacacatcacaaatgagttgcacagataggtactctctagttttcatctaggggtattcgatttttccaacaggcctcaatgggattgaaaacatcttttgcagattctctaaaaaagcatatccaacctgctga

SEQ ID NO: 3759 - DNA, 146 bp, Protomyxzoa rheumatica
tccattctattccattccattccattccattcccttccattccattcctctcgggttgattccattgcattcctttccattcctttccattgcattccactcgcgtttattcaattacattctagtacattccattccattccatt

SEQ ID NO: 3760 - DNA, 219 bp, Protomyxzoa rheumatica
aatggaatggaatggagtggagtggagtagagcagaagggaatgaaattgaatggatttaacggaaaggagtggaatggaatgggatagagtgcagtcgtatggaatggaatggaggggaacggattggaaaggaatggattgtagtggagtggagtgtaacggaattaaatggagtgcagttaagttgaaaaaaatggaatggaatggagtttaatgt

SEQ ID NO: 3761 - DNA, 165 bp, Protomyxzoa rheumatica
ataaaaatgagtttcactgatagcttctttctagtgtgtatctgtgaataatctgtttttacacttaggccacaatgggctcccaaatgtgcctttgcagattctccaattagaatttttccaatgggctgaatctaaagtaatgtttaactctgtgacatgaat

SEQ ID NO: 3762 - DNA, 183 bp, Protomyxzoa rheumatica
aatgtaatggaatggactctaatggaatggaaaagaatccacccgaatgaaacggaatggactcgaatggaatggagaggaatccacacgaatgtaatgaaatggaatggaatggactcaaatgaaatggaatggacctgaatggaatggaaagcaataaaatcgactcgagtggaatggaat

SEQ ID NO: 3763 - DNA, 162 bp, Protomyxzoa rheumatica
tccattccattccactccgctgcactacaacccattcctgtcctatccattccactacattccattccattctaatacactccgttcctttccactccactcctttatattccattctattccattccatgccattccacaccaatccactccactccactc

SEQ ID NO: 3764 - DNA, 309 bp, Protomyxzoa rheumatica
tcactctgtcacccagactggagtgcagtggcacaatctttgctcacatttcatgttacctttccattttattgcattctattccattctaatcctttccattccattccacttcactcctttccattccattccactgcactccactcagctccactccaatgcactccactgcattccagtccactccactccattccatcacactctgttccattccactccactcccctccgttccactccagtccactccatgccattacactacacaccactccattccattccatttcattccacttcaatc

SEQ ID NO: 3765 - DNA, 218 bp, Protomyxzoa rheumatica
ctaaactcctttgcactccattccattctattccactccatatcatgccccttcactcccttccattccgttccattctactacattccactccattccattccagtccgttcccctccattccattccattcctttccattcctttgcagtccattccagtccaatccattccattcccttccactccattcccttccactccattccattcccttc

SEQ ID NO: 3766 - DNA, 150 bp, Protomyxzoa rheumatica
ctcaactgcactccatttcattcctctacattccattccattgcattccaccccactccaatccactccactccagttaattctattccattgcatggcattccactccactccactccagtccactctgttcaatttcattcattccca

SEQ ID NO: 3767 - DNA, 150 bp, Protomyxzoa rheumatica
gagtttaatggaatggaatggaatggaatagaacagagttgagtgtaacggagtggagtggaatgaagtggagaagaatggagtagaatggagtggaatgaaatggaatcgattgttgtgtaatggaatggaatagagtggaatggaatg

SEQ ID NO: 3768 - DNA, 139 bp, Protomyxzoa rheumatica
cactccactccaccgcactccattcaattccattcaacccctttcctttgcactctattccactccagtaaactccaatccactttaccacattccttttgattcatttgatttgattccattccattccattcccttc

SEQ ID NO: 3769 - DNA, 155 bp, Protomyxzoa rheumatica
attgcattccattctattccattccattgcattccattccaatccattagattacattcctttctattgcattccattcgaatcaattactttgctattaattacattcaagtctgttctattccattctattccattcccgtccattccattcg

SEQ ID NO: 3770 - DNA, 227 bp, Protomyxzoa rheumatica
ctccgatcctgtccagtccactccataccattccactcgtttctttcaacaggatctccctctgtcacacaggctgtaactccattcaattctattccatttcattccactccattccacgccactccactccactctattctactccattcatttccatttcattccactccagtttaatcaactgcattcaagttaattcaactccactctattccattccattc

SEQ ID NO: 3771 - DNA, 163 bp, Protomyxzoa rheumatica
ttccattccattccactctgtttgattcatttgcattccattgcattccacgtaatttgattccattccattctattaggtttaattccatgccacaccatacgattccattccattccatttcattcgggtacattccattccattccattccattccattc

SEQ ID NO: 3772 - DNA, 135 bp, Protomyxzoa rheumatica
agtggaatggagtgaagtggaatggaatgcagtggaatgaaatgcaagacagtggaacagagttgagtggaatggagtagagtggaatgaaatgcaaggcagtggaatagcgtggagtggaatggagtggggtgg

SEQ ID NO: 3773 - DNA, 122 bp, Protomyxzoa rheumatica
aggggaagatatttccattttcaccgtaggcctcaaagtgctcaatatgtccactctcagataccacagaaagagtctttcaaaccagctctatgaaatggtatgttcaactccgtgacttg

SEQ ID NO: 3774 - DNA, 147 bp, Protomyxzoa rheumatica
gaatggagtggaatgtaatagagtggagtggaacggaagggaatggagtgcaattgaatgtagaggaggggagtggagtgtaatggaatggagtggactgagtggagtggaatggaatggaaagggattgagtggagtggaatgaaa

SEQ ID NO: 3775 - DNA, 126 bp, Protomyxzoa rheumatica
atggaatggaatggatttgagtggaaaggaatgaaatttaaagcattggagtggaatagagtggaatggagtgcagtggaatttaagggaatgtaatgaaatggatttgaatggagttgtggggag

SEQ ID NO: 3776 - DNA, 126 bp, Protomyxzoa rheumatica
ggaatggaatggaatagaatgggtgctgagtttgtgccactgcgctacagactttatgacagaaggagatcctgtcaaaaaaagcagtgcaatgggatggagtggagtggagaggagaggagtgga

SEQ ID NO: 3777 - DNA, 127 bp, Protomyxzoa rheumatica
tggaatggagtggagtggattggaagggagtggagtggagtggagtgcaatgcaattaaatggaatgaatagtaatggaatggaaaggactggattgatttggactgcagttcagtggaatggactt

SEQ ID NO: 3778 - DNA, 129 bp, Protomyxzoa rheumatica
gattcacattttgtagaatttccaagtggatatttcactccgtttgaggcctatggtagaaaagacaatatcttctttgagaaacaagacacaatgattctcagaaactactttgtggtgtgtgcgttc

SEQ ID NO: 3779 - DNA, 182 bp, Protomyxzoa rheumatica
ggaatggaatggaatggaacggaatggaaaggaatcgaatggaatggaattgaaagaaatggaattgaatggaatataatggaatggaatcaaatggaatagaatcaaatggaatagaatggaatatcatgaaaactgaaaggaattgattggaatggactccaatggaatggactcgaatg

SEQ ID NO: 3780 - DNA, 130 bp, Protomyxzoa rheumatica
acagtatacaatatatatttcaggtactttgatattttatatacattatataataataaacagattgggtagtttgataatttatgtacagtatatgttatatagtttgagtactttgatattttatgta

SEQ ID NO: 3781 - DNA, 199 bp, Protomyxzoa rheumatica
atgcaatggaagtgaatggaatagaatggaattgaatcaatccctggggagtggaattgaatgcagtggattgcaatggaatggaatggatcagaatggaatagaatagaattgaatcaaccagagtggaatggattggaatagaatggaagggaatgtaatggaatggaatttaatgcaatggaatagaatggaattc

SEQ ID NO: 3782 - DNA, 1348 bp, Protomyxzoa rheumatica
agtggagtggagtggaattgaatggagtggaaaggaatggaatggagtgtagcagagtggagaggagtgaagtggaatggaatggagtgggatggaatcgattggaatgaagtggagtttagtggagaggagtggtgggaagtgtagtggagtagaatgaaattggatggaattgaatggattggagtggagtgacgtggagaggagtggagaagagtggagtggaatggcatgcaatgaaatggaatagagtgcagtggagtggagtggagtggaatggaatgtagtggaaatggattgaacggaatggaaaggaatggaatagaatagaatggaatggtgaaatgaaatatcagctgagattgttccactgcactccaacatgtgtgacagagtgaaatcctgttgaaagaaaggaatggaatggaaaggagtggaatgaatgaaacggaattgagtggagtggagagaagtggagtacattggagtacattggaatgaaatgggatagaatggaatggagtgaagtgaagtggagtggagtggaatggaatggaatggaatgcagaggagtggagttcactggagtggaatggaacacgatggaatggtattgaatggaatggaatggaatgcaatggagtgcaatggaatgcaatggaatgggatgcaatggaatggaatcgaatggtgaaattaaatgtaagctgagatagtgccactacatccaggtctgggtgacagagatcctgtcgaaagaaaggaatggaatggaatggagtgaaaaggaatggaatggaatggagtgaaatggaatggaatggaatggagtggagtgtagtggagtggaatggagtggaatcgaatgggatggagtggaatggaatggaatggagtggagtggagaagaatggagtgaaaagaaatgggatggaatggaatggagtggagtggagtggaatggagtgtagtggtgtggagtggagttgattagagtgtagtggaatggactggagtggagtgcagtggaatggagtggagtggaatggaagggaatggaatgcaatgtaatggtgaaatgaaatgtgagatgagattgtgcaattgtattccagccttttttgacacagtgagatcccatcaaaagaaagggatggcataaagtggagtagaatagaatggagtggaatggattggagtgggctggattggagtggagtgcagtgcagtcgagtggaaaggagtggaatggaatgggatgcaatggaatgacatggagtggagtggagtggagtgaattggagtggagtagagcagaatggagtggaattaaatgggatggaaagga

SEQ ID NO: 3783 - DNA, 174 bp, Protomyxzoa rheumatica
ttccattccattccattccattccattcgaattcattccattcctctccatgtcactgggattgattcaattccattctaatccattccattccactccattacattcgataacattacattccactcagtttgattcaactccattccattccattccattccattccattcc

SEQ ID NO: 3784 - DNA, 236 bp, Protomyxzoa rheumatica
atggagtgagtggagtggagtggagttgagtgtagttgatcggagtgcagttgcatggaatggaatggaatggattgaaattgagtggagtagagtagagtttagtggactgtagtggaatggagtggagtggagaggactgcagtggagttgagtggaatggagtggaattgagtggagtggaatggagtggaaaggaatggaatggaatggaacggaatgcaatggaatggaat

SEQ ID NO: 3785 - DNA, 151 bp, Protomyxzoa rheumatica
ggaatggaatggaatggaatggaatctttccgagtagaatggaagggaatgtaatcgagtggaaaggaaagtaatggaatcaatccgagtggaatagaaaggaattcaatggaatggaaaggactggaatggaataaacccttgtggtatg

SEQ ID NO: 3786 - DNA, 214 bp, Protomyxzoa rheumatica
cattccattccattccattccactccattccattcctttcttttgagaggatctcactctgtcacacaggctggagttcggtggcacaatatcacctcacatttcatttcaccactgcattcaatttcattccattccatttcactcaaccccactccattcaactccactccactctatttcattccattctactccactccactccattcag

SEQ ID NO: 3787 - DNA, 144 bp, Protomyxzoa rheumatica
tggaatggaacggaacagaacagaacggggtggagtggactggaatggagttgagtgcagttgatcggagttcattgaaatggaatggaatggagtggagtgcagtagaatggaatggaacgtaatggaatggaatgcagtgga

SEQ ID NO: 3788 - DNA, 405 bp, Protomyxzoa rheumatica
tatatataacatagatataatagatagaatatatgtaatgtatattatatatttaatacgtatattaaccatataatatattctatatatgaaatataatatatcttatatatgtcataaaatataacatatattatgtgtcatattgtataaatatagtgcttatctcttatcaattattatattacacataatatatacaatataagacgcaggatgtaaaacaatattatatatatgttatatgtattatatataggatactatatattattatatacataatgtatatatatatttgtgggtgccctattccccatctgataacttgttgtaagaagcgcagcgtaataatgtgtgggcttgggattctgtttttgaaacaaaacactgagccttcaatga

SEQ ID NO: 3789 - DNA, 174 bp, Protomyxzoa rheumatica
ccattccattcagttccaatccttcccatttcattcggtttgattccattccatttcagtctattccattccattctattccattccattccattgcactccactggggttgattgcgttctatttcattccgttccattccattccattcctctctagttgactccgttccat

SEQ ID NO: 3790 - DNA, 209 bp, Protomyxzoa rheumatica
tggatagagcggttttaaaccctctttttgtggaatttgcaattctgtatttagagtgctttcatgcctgtggtacgaagggaatgtcctcacataaaatctagacagaagcattgtcggaaactattttgtgatacctgccttcaactctcagagttgaatattcctcttgaaggagcacttttgaaaaactctttttgttgaatctc

SEQ ID NO: 3791 - DNA, 221 bp, Protomyxzoa rheumatica
agtggagtggagtggaatggagacgagtggactggagtgaagtagaatggaatggaatggagtggagtggaatggattgacatggattggaatggagtggagtggactggagtggaatggaatgaaatggtgaaaagaaatgtgtgacacagggagatcctgttgaaagaaatgagtggagtagaagggattggaatggaatggaatggaattgattggag

SEQ ID NO: 3792 - DNA, 269 bp, Protomyxzoa rheumatica
aatggaatggaatggaatggaatggaatggaatggaatgttatcaaattgtgtggaatggaacagaatggaatggaattgactggaatcaaaccgagtagaatgtaaaggaatggaatggaacgttattaaacagagtgtaatggaatggaatgtaacggattgtaatcgaatggaatggaatggaatggaatcaaaccgagtggaatgcaatggaatggtttggaatggaatggaatggaattgaatggaattaccccgagtgaaatg

SEQ ID NO: 3793 - DNA, 234 bp, Protomyxzoa rheumatica
ccattccattccattccattccattccattcaattacactcggcttgattcatttccattctaatcccttccattccattccattccactctggttgatacaacttcattctactccattcgattccattccattccatgccaatccgttgcattctactctggttgattcaattctttcaattccatactgttccattccattgctttccattccattccattccattccatt

SEQ ID NO: 3794 - DNA, 169 bp, Protomyxzoa rheumatica
ccattccattccacacaattccattccattccattccatttcaagtgggttgaatccattacattccttttccttccattctattccattgcattccattgcatgccattccaatcgggttgattcctttccattccattacattcgggttgattaaattccattccat

SEQ ID NO: 3795 - DNA, 143 bp, Protomyxzoa rheumatica
caacacgaatggaatggaacggaatggaatggaatggtatggaatccatccaagaggaatggaatggaatggaatcaaatagaatagaaaagaatacaatagtatggaattgaatcaactggaacggaatggaatggaatgga

SEQ ID NO: 3796 - DNA, 167 bp, Protomyxzoa rheumatica
ttgaatgcaatggaatggagtagagtggaatggagcagagttgagtggaatgaagtggaatggaatggaacggaatggaacagaatggaatggagtgcagtggagcgcatcgtaatggagtttacagtagtggattggagtgcagtggaatggaatggaatggaatg

SEQ ID NO: 3797 - DNA, 218 bp, Protomyxzoa rheumatica
tggaatggaatggaatgcaatggaatggagtcatccggaatggaatttaatggaatggaatgcaatggaatggaatcaatcaacccgagttcaatagaatgcagtggaaaggaatggaatggaatggaaagtgcccgaatggaatggaatgtaatggagtgtaagggaattaaaaaggatcaatccgaatttaatggaatggaatggaacggaatgga

SEQ ID NO: 3798 - DNA, 143 bp, Protomyxzoa rheumatica
cgttccgtttgattgtattccactagattccactccattccattccattctattctattctattctattccattccattcccttccattcgatgccaagcaatacgaatacattccattcgagtccactcctttccattccat

SEQ ID NO: 3799 - DNA, 151 bp, Protomyxzoa rheumatica
attgtcccaaagctctaaaatatccacttgcagaccctctgaaagagtgtttcagaattgctcaatcaaaggagaggttcaattctgtgtgaccaatgcactcatcacaaaaagtttgtctgaatgcttctgtgtagaatggatttgaaga

SEQ ID NO: 3800 - DNA, 179 bp, Protomyxzoa rheumatica
attcaactcacagagttgaacctatcttttgattgagcagatttgaatctctcttttggcagaaactgcaagtagatatttggagccatttgcggcctttggtggaaaaagaaatattttcaaataaaaactaaacagaaacatactgagaaacttctttgtgatgtgtgcattcatct

SEQ ID NO: 3801 - DNA, 360 bp, Protomyxzoa rheumatica
tgcagattctacaaaaagagtgtttcaaaactgctccatcaagagaaagttttaactctgtgagatgaatgcaaacatcacaaagatgtttctctgaatgcttctgtgtagttttaatctgaagataattgcttttccacggtaggccttaaggccctcaaaatatccagttgcagattctgcaaaaagagagattcaaaactgctcattcttaagataggttcaagtctgtgagttgaatgcatacatcacaaagaagtttatcagaatgctcctgaatagtttttatgtgaagatatttacttttccacaatagccctcaaagggctccaaatatccagttgcagattctacaaaaag

SEQ ID NO: 3802 - DNA, 144 bp, Protomyxzoa rheumatica
aagagggtctgaatgtttgtccttcacatgagattgcagaacactgctaagagggtacgattgtttctacctcacataagattccagaacacttctacgagggtctgaatctttgtcccatacataggactccagaacactcct

SEQ ID NO: 3803 - DNA, 148 bp, Protomyxzoa rheumatica
gcgctttgaggactattgtgaaaaaggaaatatcttcacatgaaaactacctagaagcattctcagaaatgtcttttgacgggtgcattcatctcaaagagtgctttgcggcccattgtggaaaacaaaatatcgtcacataataact

SEQ ID NO: 3804 - DNA, 203 bp, Protomyxzoa rheumatica
cctcaatgagctcccaaatgtccatttgcagatctacaaaaaaacggttcccaaactgctgaatgaaaagaaagatttaattccttgagatgaatgctcacatgacatagatgtttctcagatagcttccttctagtttttgtcatgggatattcacttttttgtcattggccttgattagctcccaaatatccattcacaga

SEQ ID NO: 3805 - DNA, 146 bp, Protomyxzoa rheumatica
aaccactttgtgatgtgttcgttcacctcgaggagtaaaatctttcttttcattcagctgtttggaaacactgatttctaaaatctgcaaatggaaatttgtggtgcattgaggcctaaggtaaatatcatcagataaaaactaga

SEQ ID NO: 3806 - DNA, 192 bp, Protomyxzoa rheumatica
aatctgcaagtgaatatttggagccctatttcgccctatactggaaaagcaaatatcttcaaataaaaactacacagaggcattcagagaaacttctctgtgatgagtgcattcatcacacagagttgaacatttgtttagatttagcagtgttgagacaatctttccgtagaatcttgaagtgaatatttg

SEQ ID NO: 3807 - DNA, 347 bp, Protomyxzoa rheumatica
gtgattccataacactgcttcagttgtctaaatgtttgtccgtcatataggtttccagaacactgctaggaggatctgagtgtttatttctcacagggaattccagaagactcctgctgttgtctgaatgattgtctcttacacaggattccagaagactgcaacgagggtctgaatgtttgagcctcatgtaggattccagaacaatggtgctgagttctgaatctttgtccctgacatagtgattaagaaaactgctaagagggtctgaatgtttatccctcatgtaggattccagaactctgctcctggggtctgaaagtttgtctctcacataggattccagg

SEQ ID NO: 3808 - DNA, 142 bp, Protomyxzoa rheumatica
gtcaattcagctcacagaggtataatttcttttgattcagcaggttggaaactattattataggatctgccaaggaacacttgggagcccattaaggcctatggggcaaaacaaaatatccccccaagaaaactggaaagaa

SEQ ID NO: 3809 - DNA, 246 bp, Protomyxzoa rheumatica
ccaatcaactccactccactctattccactttgttcccttccgttccattccgttttgttctgttccgttctactccactccattccattccactccattctaatccactctactccactcctttcctctccattgcatttcacatcactccattccattgcattttactccattccgttccattcctttatttagactggatcttactttgtcacccgtactggagtgcagtggcacaatcttag

SEQ ID NO: 3810 - DNA, 133 bp, Protomyxzoa rheumatica
tggtaatatccacaagtggacatttggagtactttgagagctttggtggaaaagaaatatcttcacataagaactatacagaagcattctgacaaatttctctgtgatgggtgcattcatctcacagatttga

SEQ ID NO: 3811 - DNA, 128 bp, Protomyxzoa rheumatica
cacagagttggtcctttcttttcatagagcagttttgaaacactcttttaggagaatctgcaattggatatttggagcgctttgtggccgattgtagaaaaagtaatatcttcaaataaaaacttgac

SEQ ID NO: 3812 - DNA, 357 bp, Protomyxzoa rheumatica
atattcaaaacagctcaatcaaaagataggttaaagtctgtgagttgaatgcatacatcttaaataattttctcagaatgcttctgcgtattctttattagaaaatatttccttttccaaaataagcctcaaatcctccaaatatccacctgcaaattttatgaaaagagtgtttcgaaactgctcaatgatatgatagtttcagttctgtgagatgagttcacacatcacaaagaggtttctcacaatgctgtcgtatagagtttatttcaatatatttccttttccaccataggccaataaggactccaaatatccagttgaagattctacagaaagagagattcaaaactgctc

SEQ ID NO: 3813 - DNA, 532 bp, Protomyxzoa rheumatica
gttgtaaaggcagttcatttcccataaaaatcatttgaccatatatatgagggtttatttatattggctttctatattactccattagtctatttgtagcatgctattttggaattttgtagtaagttttgaaatcattaagtgtgacttctctaactttggtatttttttttcaaaattatttttgcaatttagggtcccttgagattcctcataaacttaaaaattgattttttaatatctacacaaaataattggcattttgcttcttggttacttcctaattttattcttttgatgctattgtaaattgagttgttttcataattttcttctcagattattcgtattactacataaaatacagtttatttttctatgttgattttgtatgatactactctgctgaatttattaattttaatattttttgtgtggaatctttaagattttctacataaaagaatatattttctgtacacactttgatgaagtttatttcattgtcttttttaatttctctgaatgaaac

SEQ ID NO: 3814 - DNA, 254 bp, Protomyxzoa rheumatica
cacataaaaactagacagaagcattctcagaaatttctttgtgatgtgtgtcctcaactaacagagttcaaactgtcttatgatacagcagtttggaaacactccttttgtagaatatgcaagtggatacttggatagctctaactatttcgttggaaacgggaatatcatcatataaaatctagacacaagcactctcagaaactacattctaatatctgcattcaagtcacagagttgaatattccctttct

SEQ ID NO: 3815 - DNA, 243 bp, Protomyxzoa rheumatica
aacttctttgtgatgtgtgcattcatctcacctattgaaactttcttttgatggagcagtttggaaacagttttttcataaggtccgcacagggatatttctgagccctttatgccctatgttgaaatagcaaatatcttcacatacaaactagacagaggctttctgagaaactactttgtaatgtatactattatctcacagatttaaatctttcttttcttgagcagtttggaaacagtc

SEQ ID NO: 3816 - DNA, 173 bp, Protomyxzoa rheumatica
gcttttatgtgatgatatttccttttccaccataggccccaaaccactccaaatatctgcttgcagatactaaaaaaagagtgtttcaaaacttctcaaacaaaagcaaggttgaattctgtgagatgagcgtacacatcacaaagaagtttctgagaatgcttctgtctagt

SEQ ID NO: 3817 - DNA, 128 bp, Protomyxzoa rheumatica
aaatgttcaagtctctgtgttgaatgcacccatcacaaaggagtttctgagaatgcttctatctagtttctatgtgaagatattcccgtttccatgttaagcctcacatcgctccatatatccacttg

SEQ ID NO: 3818 - DNA, 144 bp, Protomyxzoa rheumatica
taaataggataaaatggaataatcatcgaatggactcgaatggaatcaacatcaaatggaatcaaacgcaattaacaaatggaatcgaaaagaatcttcgaatggactcgaatggaatcttcgaatacaatggaatgtaataat

SEQ ID NO: 3819 - DNA, 257 bp, Protomyxzoa rheumatica
aacctttcttttgatagagcagttttgaaacactgtttttatagaatctgcaagtggacatttggagacttttgaagcatatggtggaaatggaaataccttcccatgaaaactagacagaaacattctcagtacctactttgttatgtttgcattcaactcacagagatggacataccttttcatagagcagttttggaaaactcttttggtagaatatgcaaatggataattggaacgctttcaggccttcgttg

SEQ ID NO: 3820 - DNA, 163 bp, Protomyxzoa rheumatica
cacagagttgtgccttccttttgaaagatcagttttgaaaaactctttctgtagaatgtccaagtggatatttggatcgcatttaggtcttcgttggaaaagggaatatcttcaaataactagacagaagcattctcagaagcttctttgtgatgtgtgcatt

SEQ ID NO: 3821 - DNA, 210 bp, Protomyxzoa rheumatica
atcaaattacacaaactatatattatatactgtacataaagtatcaaattacacaaacgatatattataaactgtacataaaatatcaaagtacagcaaatatatattccgtactctacataaaatattaaagtacatcaaatatatattctatactgtacatcaattatcaaagtacattaaatatatattctataggttggataaaat

SEQ ID NO: 3822 - DNA, 122 bp, Protomyxzoa rheumatica
ccaaatatccacttgcagattctaaaaaaagagtgtttcacaactgctaaatcataataaaggttcaaccctgtgaaaatgaatgcacatatcacaaagaagtttctctgaatgcttctgtg

SEQ ID NO: 3823 - DNA, 203 bp, Protomyxzoa rheumatica
aatcttctttgtgatgtgtgcattcatctcacagagctgaaactttcttttgattcagcagttttgaaatactctatttatggaatctgcttgtggatttttggagcgctttgaggcatgtggtggaaaaggaaatatcgtcacatgaaaactagacagaagcattatgagaaaattctttgttatgtgcgcattcaactcac

SEQ ID NO: 3824 - DNA, 550 bp, Protomyxzoa rheumatica
ctctcaaaaggaaggttcaactctgtgagttgaatgcacatattacaaagcagttcctgagaatgcttctgtctattttttaggtgaagatatcactttttccaacataggccacaaagcatttgaaatgaacacttgcagattctacaaaatgtttgtttcaacactgctgtatcaaaagaaaggttcaacaatgtgaattgaacaaacccatcacaaaggagtttctgagaatgcttctgtctagtttttatgtgaagatatttctttttccaacataggcaacaaagcactccaaagaacacttgtagattatacaaaaagtgtgtttcaacactgctctacctaaaggaagtttcaagtctgtgacttaaatgcacacatcacaaagcagtttctgacaatgcttctgtctagtttgtatgtgaagatatttcattttccaccatactccacaaatcgctccaaatatccacttgcaaatactacaaaaagactgtttcaaaagttctctctcaaaaggaaggttcaactctgtgagttgaatgca

SEQ ID NO: 3825 - DNA, 247 bp, Protomyxzoa rheumatica
tgtttgttcctcacataggattccagaacactcctgctgtggtctcaatgtttgtccctcacctaggattccagaataatgctatgaaggtctgaatgtttgtccctcacataggattccagaacaccccagctgtggtctgaacgattgttcctcacataggattccagaagactcctgctatggtctacatgtttatccctcagttaggattccagaacactgctgctgggttctgagtgtttgt

SEQ ID NO: 3826 - DNA, 126 bp, Protomyxzoa rheumatica
ccctcatatatgattccagaaatctcctattctggtctgaatgtttgaccctcagttaggattccagaacactgcagttggtttttgagtgtttgtctcacacctacgattccagaaaactgctaa

SEQ ID NO: 3827 - DNA, 215 bp, Protomyxzoa rheumatica
ctatgtgacggacaaacatttagagccacgtagcagtgttctggaatcgtgtgtgtgggacaaacactcagaacccaaaaacagtgttctggaataataagatagggacaaacattcagaccacagcaggagtgttctgcaaccttatgtgtgggagaataattcagaacctcatagcagtgttatggaatcctatgtgagggacaaacattcag

SEQ ID NO: 3828 - DNA, 380 bp, Protomyxzoa rheumatica
ccagaacactactgcttggttctgagtgtttgtcactcacataagattccagaacactgctcctgtcttctgaatgtctgttcatcacacaggatttcagaacactcctgctgtggtctcaatggttgaacctcatataggattccagtacaatcctgctttgatctgggtgtttgtacctcacatgggattctagaacaaacctgctgttgtctgaatgtttctccctcacataggtttccaaaacattcctgctgtggtctgagtgtttctccctaaaataggattccggaacactgctactggggtgtgaatgattgtccctcacataggattccagaacactgctaagagcgtctgaattattctcccgaacttaa

SEQ ID NO: 3829 - DNA, 793 bp, Protomyxzoa rheumatica
ttttttctggggtcttcttgctcaagaggaagtatgttcagttgatacggggcttagaattttatttatagcttttattacattctaaaacccccagcagaaacaagtcttaacaaacacagattttaatttctgaacattcttctaataagttttgcacaggtagcggaacaactaaaaaaactgttttttgcattgatggtctacctcattacaatttaacctctaaagggtgttttagccagctctagagtctgctacggttaaggtgaatttactgcttcttcccataataaagaatggtattttaaaataacataacttctatggcatatatttttaaagcatgaccacaatttgaataattagaacatttaaaaattcgaaatattgttatactaacactgcaccaaaatttatccttccaatgatgacagggaatttttaatagttgttatttttatagtaaaattaaactttaataaaataactgactttcaaacttcagcaagaagacacatattcagccagagatatcagttcccctttagaaaaaaatactcacttctcattaaaatctctctgtatcttactgatttcagatagaatttaaatttcaccttaataacagaaacaaaagaactagttaatctaacaaaaactaataaacgtatgcccaaatttactggcagaatcatgggtacgtcatataatagtaacattctaccagttttaagtaaaataaataaggaaataatcttaacagtacaacctaccaggaggggcgtgtccc

SEQ ID NO: 3830 - DNA, 250 bp, Protomyxzoa rheumatica
gcagtgttctggaatgctacatgaaggacaaacatcctgaccctcctaacagtgttatgcaatcctatgtgagggacagacatttagaccctcgcagctgtgttctggagtcctatgggagggacaaacattcagacccttgcagcagttttctggaatcctttgtgagggagagacattcagaccctcatagtggtgttctggaatcctgtgtgacagacaaacattcagaacctggtatcagcgttct

SEQ ID NO: 3831 - DNA, 339 bp, Protomyxzoa rheumatica
ttccagaacactcttgtgatggtctgaatgtccctcacatatgattccagaaaacgcctgctgtggtctgaaggtttgtgcctcacataggattccagaacatttctgctgtggtctgaatatccctgacatagaattccagaacactgctatgagggtctgaatgcttttctgtctcataacactccagaacactgcttctagggtctgaatgttggtccctgacataggattccagaacactgctacgagggtctaaatgtttgttcctcacataggattccagaacactcctgctgttgtttgtatgtttgtctgtcacataggattccagaacac

SEQ ID NO: 3832 - DNA, 238 bp, Protomyxzoa rheumatica
tctacaaaaactgtgtttccaaatcactgaatgaaaagaaacatctaacgctgtgagataaatacacacatctcaaagcagtttctcatgtagcttccttctagttgttaccctgggacatttgtttttttgtcattggcctcaatcagctacaaaatgtccattcacagaataggcaaaaacagtgtttcaaaactgctgaatcaaaagaaatgtttacctctgtgagatgaataca

SEQ ID NO: 3833 - DNA, 130 bp, Protomyxzoa rheumatica
gtccattcacagaatggacaaaaaaagtgtttccaaattgctgagtgaaaagaaaggtttaactctatgagacgaatgcccacatgacaaagtggtttctctttttgctttcttctagtttttatcctgg

SEQ ID NO: 3834 - DNA, 154 bp, Protomyxzoa rheumatica
ttcaactatttggagacactgtttttgcagaatgtgcaaagtgatatatcagagagtattgaggcctatgtcataaaaggaaacatctttagagaaacactagaaaggagctttctgagaaactgttttgtggtgtgtgcattaatctcaaagg

SEQ ID NO: 3835 - DNA, 196 bp, Protomyxzoa rheumatica
caaatggactcgaatggaattatcatcgaatggaatcaaatggaatcatcaaatggactcgaatggaataatcgaatagactccaattaaatcaaccaatgaaatcgaatgcaatcatcgaatggactcgaatggaatcatcataaaatggaatcagatggaatcaatgaagggactcaaatggaatcatcgaatg

SEQ ID NO: 3836 - DNA, 185 bp, Protomyxzoa rheumatica
agtccattccattcaagtccaccccattggtgcccattgcattccattccatcacatttgattccattccattccattccattactttccattccgtttgagtcaattcccttcgagtctatggcattccagtccattacattggtgtccattcaattccattccattcctttatattacattgc

SEQ ID NO: 3837 - DNA, 268 bp, Protomyxzoa rheumatica
gattctacaaaaagagggtttcaaaactgctcaatcaacacaaagttttaacactgtgagatgaaagcacacaccacaaagtttttcagattgcttgtgtctagattttatgggaagatatttccttttctaccatagcctgctaagcgctccaaatatccacttccagattctacaaagagtgtttccaaactgcataatcaaaagaaaggttcagctctgtgatataaacgtacacatcacaaagcagtttctcaccattcttctg

SEQ ID NO: 3838 - DNA, 175 bp, Protomyxzoa rheumatica
ctaaagttgttttccttgtagaggtctttcacctccttggtttcttctattcctaaatattttgttttttcagatactataaaaggggtgagatcttggtatgattctaacttggctgctgttggggtataacagtgctactgatttgtgtacagtaattttccctcctgaaaca

SEQ ID NO: 3839 - DNA, 146 bp, Protomyxzoa rheumatica
agtgaaatcggcatacaagcgttatacttcaatgtaataaaaggcatctatgacaaacccacagccaacataatactgagcagggaaaatttggaagcattccccctgagaactggaaaaagacaaggatgcccactctcgccact

SEQ ID NO: 3840 - DNA, 133 bp, Protomyxzoa rheumatica
tggcagagcgtaagcaagagttacatcacctagatgatcaatgcagagatgtctcatgcccccctatactcagagcctggacaggagttacatcacctcgctgatcaatgcagtgatatgtcactataccccg

SEQ ID NO: 3841 - DNA, 184 bp, Protomyxzoa rheumatica
ctatttgaataaattccattcgaaaccattagtttcaagtccatgctatttgagaccattccattcgagtccattacatttgggtatgttctattacattacattcaattcgttcccattgcatttcattctattgcatttgagtcctttccattcgagtccattccattccattccattccat

SEQ ID NO: 3842 - DNA, 437 bp, Protomyxzoa rheumatica
cacagcagaattaagaagtacatagatttcccatatactgtgatccacatatatatgtagccttcgcccttttcaacacctccccccaccatagtagtacctttgttaaaatgaggaacctacattgagacatcatagttgtccaaaagccatagtttacattagggtttactcttgtggttttacatgctatgggtttgagtaaatgtataatgacatgtatccagccttatagtacctcacagaacactttgttctaaaagtcatccctgctcttcctgtttattacatatcatccccttaaccctgcaaaccatctccatcatttcgcatgttacatagttgcagttatatagtaagtagccttttcagactgccttcttttacttagtaatatgcttttaagtttcctcatcttttgaggacaagatagccca

SEQ ID NO: 3843 - DNA, 219 bp, Protomyxzoa rheumatica
ctctctttttgcagaatctgcgagtggatatctggagaacttggaggcctatttggaaaaggaaatatcttcacatataaactatgcagaagcattttgagattcttctttgtgaggtgtgcatgcaactcacagagttgaacttatcttttccttgagcactttcatatctcattttctgtagaatctgcaagtggatatttggagctctttgcaccc

SEQ ID NO: 3844 - DNA, 267 bp, Protomyxzoa rheumatica
gtgagggacaaatattcagaccctcgtagcagtgtactggaatcctatgtgagggacaaactttcagaccagagcagcagtgtccttgaatcctgtgtgagggacaaatattgagatcccagcaggagtgttctggaatcttttgttaatgagaaacattcagactacagcaggagtgttctggaatcctatgggagcaacaaacattcagaccccagcaccagtgttcttttgtcctatgtgagaaacaaaaattcagatgctcgc

SEQ ID NO: 3845 - DNA, 184 bp, Protomyxzoa rheumatica
gattccagaacactgctacgattgtctgaatgtctgtccatcacataggattccagaacactgctgctggggtctaaatctttgtccgtcacattggattccagaacacagctatgagggtctgaatgtttctccctcacaggcgattccagaacactcctgctgtggtctgaatgtttgtccc

SEQ ID NO: 3846 - DNA, 218 bp, Protomyxzoa rheumatica
tgtcatcctttatcagggacatcctagctaagggagggaaggcagcagcatcccactgagctccaccacgtccgatgatggcatccattcagaaggtggacgaacttcactgctggtcactcagtcgatcccaaggggcctcggagatggctgacttccagcaacacagactgaggatgaaggaggccagtgtttcctgcagatgagaatggcagggg

SEQ ID NO: 3847 - DNA, 134 bp, Protomyxzoa rheumatica
ggaatggaatggaatgaaatgaaatggaatggtgcaatgaaatgtaagctgagattgtgcaactggcctccagcctgattgaaagagtgagatactcttgaaagaaaggaattgaagggaatgcagaggaaggg

SEQ ID NO: 3848 - DNA, 216 bp, Protomyxzoa rheumatica
gtagattctggatattagacctctgacacatggatagagtgcaaaaattttctttcactctgtaggttgcctggtcactctggtgatagcttcttttgctgtgcagaagctcgttagtttagttagatctcatttgtcaattttagcttttgttgtgattgcttttggtattttattcctgaagtctttgctcatgcctatgtcctgaatggtatt

SEQ ID NO: 3849 - DNA, 203 bp, Protomyxzoa rheumatica
tgcactttccagactccataactgtgaaaaatacatttctgttgtttatcctttacccagtctgaggtattttgttatagcagcctggatgcactatgacactttcttaggcactttggtctatttctgaatttttagtttcagtgacatatgagtttttaatcaatcaagatttttcacagagcttgccagtcttgtttttt

SEQ ID NO: 3850 - DNA, 146 bp, Protomyxzoa rheumatica
gcagtttctgagaaagattctttctagcttttatctggagatatttcctttttcaccacaggcctcaatgtgatccaaattaaatatttgcagattccaccaaaagttcgtctccaaatggctccatcaaaggaaaaatttaacaa

SEQ ID NO: 3851 - DNA, 137 bp, Protomyxzoa rheumatica
tccactccattccactccaatccattccgttccactcacttccattccacccctttccattcccctacatttcactcctctcttctccactgctttccattcgatgcctttcgattaaattccattcgattccattc

SEQ ID NO: 3852 - DNA, 151 bp, Protomyxzoa rheumatica
gtgtttcaaaactgctctatcaaaagaaaggttcaaccttttgagttgaatccacaccccacaaagaagttaatgggaatgcttctgtctagtttttgtgaagatatcccttttccaacgaagggctcaaagagggccaattatccacctg

SEQ ID NO: 3853 - DNA, 158 bp, Protomyxzoa rheumatica
tcatcttgaagaatacaatagagagatggaaaatgaaagagatagacagacatatgcacagaaaaagagaaagggagacagagagattgagagatgaaacacaggacagagcaagtgggaggaaaataatagctgttttagaaatataactttggaag

SEQ ID NO: 3854 - DNA, 166 bp, Protomyxzoa rheumatica
ggattcatctcacagagttaaatgtttcttgtcattcaggaggatgaaaacactcctttttgaaatctgtgaatgaacatttgggagctcattgagggctatggggataaacagaatatccccagatgaaaagtacaaagaagttatctgtgaagctaatttttga

SEQ ID NO: 3855 - DNA, 467 bp, Protomyxzoa rheumatica
gttttgtagaatctgcttgtggatatttgtagctcttggaggaattctttgtaaaagggatatcttcacatacacactagtcagaagcattctcagaaacttctttgtgatgtgtgaattgaactcacagagttgaaccttccttttgagagagccgttttgaaacaatctttttgaagtatcttcaattggatgtttgtagtgatttgaggcctaagatggaagaggaaatatcttcacatacaatctagacagaagcactctcagaagctgcttggtgatgtctgcattcaactcacagacttgaacccttgttttgaaagagcagtgttgaaacacacattttgtacgatctgcaagtgttcatttggaacgctgttgtgcctatggtggataaagaaatatcttcacataaatactagaaagtagcattctcagaaactgctttgtgatgtgtgcattcaact

SEQ ID NO: 3856 - DNA, 437 bp, Protomyxzoa rheumatica
agagggagactccatcaaaaaaaaaaaagaaagaaagaaaagaaaacttcaggccaatattcttgacaaacatcaatacaaaagttctcagaaaaatatttgtaaaccaaatccagcagcacatcaaacaggtaatccgtcattatcaagtaggctgcctccttaggatgcaaggttggcccagcatgtgcaaatcaataaatgtaatacatcacataaacataactaaaaacaaaaaacagacgattatcccaatagatgcagaaaataataaaagccgtgtataacaaacccacagccaacaatctgttgaatgggcaaagttgggagctttttttttgaaaaccagcacaaggcaagaatgccctctctcaccatttctattcaacatagtattgaaagacctgaccagagcaatcaggctagagaaagaaata

SEQ ID NO: 3857 - DNA, 325 bp, Protomyxzoa rheumatica
aacattcagatgagagcaagagttctctggaattccatgtgaggtacaatcattcagagccttgtagcagtgttctcgaatcgtatgtgagggagaaactctcagaaccctccagcagtatactggaatcccatgtgaaggacaatcattcatcccctcatagccgtgttctggaatcctatgtgaggaaaaacctttagatccacatagcagtgttctggaatcgtacgtgagggacaaaaactcagaacccaacagcagtgttctagaatcctaagtgagggacaaacattcaaaccagaacaggaatgttctggaatcctat

SEQ ID NO: 3858 - DNA, 122 bp, Protomyxzoa rheumatica
gaatgcttctgtgaagtatttatgggaagatatttcctttttcaccataggcctgaaggagcaccaaatgttcacttgcagattctatataaagagtgtttcaaaactgctctatcaaaaga

SEQ ID NO: 3859 - DNA, 181 bp, Protomyxzoa rheumatica
tgcttgtgtctagtttttatgtgacaatgtttccttttctaccataggcctcaaagctctacaaatatccacttgaagatactgcaaaaagtgtgtttcaaaactgctcaattaaaagaatggttcaacttcgtgagatgaatgcacacatcagaaagaaatttctcagaatgcttctgtc

SEQ ID NO: 3860 - DNA, 177 bp, Protomyxzoa rheumatica
cctgggtgatcagtgcagagatatctcacaataccccctgtaagcagagcataggcaagagttacatcaccagggtgatcagtacagagatatgtcataattcccacagtaggcaaaacatacacaagatttacatcacctcagtgatcagtgcagagatatgtcccaatgtccctc

SEQ ID NO: 3861 - DNA, 124 bp, Protomyxzoa rheumatica
ccagcccgcgctaccggaggcctccgcacggcaggggcagatgcaaggcatcccggcgcgctcccaggcgtaccaggagctggggcgctcgtccgcactgccctccggcctgctgctggatgag

SEQ ID NO: 3862 - DNA, 138 bp, Protomyxzoa rheumatica
tactgtacataaaatatcaaagtacccaaagtatgtattagatactgtacataaaatatcaaagtaccaaaagtatatattacctactggaaataaaatatgaagatacctcaaatatatattatattctgtacataa

SEQ ID NO: 3863 - DNA, 156 bp, Protomyxzoa rheumatica
ggttcaactccgtgagatgaatgcacacatcacaaagaaggttctcggaataattctgtgtagtttttatggaaagatatttccttttccaccatcggccacaaagggctcaaatttccacttgtagagtctacaaaaagagagtttcaaaactgc

SEQ ID NO: 3864 - DNA, 221 bp, Protomyxzoa rheumatica
gagcagtttgtaaaaactctttttctagtatatgcaagcggatatttggagccctttgtggcctatgttgcaagaggaaatatcttaacataaaaactacacagtatcattctgagaaacttccttttcatgtgtgcattcatctcacatagttgaacctgtcttttggttgagcagtatggaagcactctttttgtagaaattgcaaggggatatttgga

SEQ ID NO: 3865 - DNA, 434 bp, Protomyxzoa rheumatica
actcacagagttgaaactttctttagagagagcagatttgaaacactctttctgtggaatttgctagtgcagatatcaaacgcttcgaggacaatggcagaaaaggttatatcttcatattaaaattagacaaaatcattctcagaatacactttgtgatgtgtgtgttcaactcacagaatttaacattcctttaatcgagcagttaggaaacactctctttgtaaagtctgcaagtggataattggccgtctttgagcccttcggtggaaacgggatttcctcatataatgctagaccgaagaattctcagtaacttcttcgtgttgtttgtattcaactcagagatttgaaccttcctttggagagagcagatttgaaaaactctttttttggtatttgcaagtacagatttcaagcgctcctaggcctat

SEQ ID NO: 3866 - DNA, 621 bp, Protomyxzoa rheumatica
gaaacgactcgagtggaatgaaatggaatggaatggaatcgaatgtaatggaatgagattgaatggactcaaatggaatggaatggcatggtctcaaatggaatggaatggcatggtctcgaatggaatgcaattgaatggactcaaatggaatggaatggaattgactcgagtggaattgaatggaatggaccggaatggaattaagtgtaatggaatggacacgagtgatatgaaatggaatggactcgaatggaatggaatggaatggaatggaatgatttcgaattgaatgacatggaatggactcgaatggaatgggttcggattggatggtctcaaatggaatggaatggaatggacttaaatggaatggaatggaatataatggactcgaatggaatgaaatggactccagtggaatggaatggaatgttatggtctcaaatggaatggaacagattcaaatggaatagaaaggaatggactagaatctaatggagtgcaattgaatggactcgaattgaatggagtgtaatggaatcgagtggaatggaatgtaatttaaaggactcgaatggaatggaatggaatggaatggacccaaaaggtatggattgg

SEQ ID NO: 3867 - DNA, 237 bp, Protomyxzoa rheumatica
aacttttcttttgattgagtagttttaacaaactctttttgtagtatcagaaactggatatttgtagcgttttgaggcctatagaggaaaaggaaatatcttcacataaaacccagaaagaagcattctgagagaattctcttcgatttctgcattcatctcacagagttgaacctttcttttttgagaagtatttaatcactctttttgtagaatctgcaagtggatatttggagc

SEQ ID NO: 3868 - DNA, 129 bp, Protomyxzoa rheumatica
agagttgaaccttccttttgagagagaagttttgaagcagactttttgtggtaactgcaagtggatatttggagcgatttgatgccaatgttgggaaaggaaatttcttcatctaaaaactagacagaa

SEQ ID NO: 3869 - DNA, 361 bp, Protomyxzoa rheumatica
aacactctttttgcagtatctgcaagtggatatttggagcactttgaggcccagtttgggaaaggaaatatcttcacataaaaactacacagcagcattctgggaaacttccttgtgatgtgtgcattcatctcccagagttgagcctgttttttgattgagcagatctgaaacactctttttgtagaatcagcaagtggatatttggtggtctttgaggcctattttggaaaaggaaatatcttcacatcaaaactacacagacacattctgagaaacttctttgtgatatgtacattcaactcgcagttttgaaactatcttttgatagagcagttttcaaacactctttttgtagaat

SEQ ID NO: 3870 - DNA, 291 bp, Protomyxzoa rheumatica
tttatgtgaagatattgccttttcgacaatagacttcagtgcgcaccaaatatccacttgcagaatctacaaaaggagtgtttcaaaactcctccatcaaaagaaaggttcaactctgtgagatgaatgcaaatagaacctagaaatttctgagaattcttctctgtagtttttatttgaagatatttcctttgcctccatagaccgcaagaggctccaaatatccacttccagattctagaaaaagagagaaccaaaactgctcaatcaaaagaaaatttcaacactgtg

SEQ ID NO: 3871 - DNA, 126 bp, Protomyxzoa rheumatica
atgtaacactttggtaggctcggcctacaggggaatcttgacatatttcttcactgttaaatgaggtgatttaactcttgtctaggctgtgcccacagggggattgagacatatctctgcactgat

SEQ ID NO: 3872 - DNA, 188 bp, Protomyxzoa rheumatica
tcgataatgattccattggagtccattcaatgattccgttcgattccatttgatgatgattacattcgagtctatacgatgattccgttcaagtccattcaatgtttcctttcgataccactcaacattgattccatttgattccattcgatgattaaatttgagtgtattccatgatttcattcgac

SEQ ID NO: 3873 - DNA, 790 bp, Protomyxzoa rheumatica
agcagcgaggacccccacatccggcctggcccatccggtcctgtccctgggcagcgccctgctctgcgcccacagccatgagtatttcccagattgttcagggaggcctggtgggtcatcagggaaaaaccgcgactgggtgtttgcgtgggaggagctgcggcccgtggggtccccagtctctcttgttaaaaattaacgggagtctatgttaaaacgttaaccagtttatctgaacaaacagtgattggtgaaatggaaagcacccagccatgatttctggtccaccagaggggcataaaggaaaggctttcataagatgcatgagaaagcagcccaaattcaaaaattggttccagttatgtagtcaccttatttgaactatccagatggaaatgtcctggttacatattcagaggttaattgcatgtttgtcatgggttaaacctgcattttgcttcaggctaagatagtgttttataggaaatatatttgagttaggttttagatttttttttgtttgttttttgttttttacctatgaacacagggcactagagccactttagactaattttctgatctttaattattttaacactccagaggaggactggttttctcctgtgtttttttaatgtatggcaagtggaacctctaatcgaccaccctgtttttcatcctaactcaggcttgcagtaaaattatcagttcccactttctttgctgcattctcaaacgcaacacatgagaccagctttcccttgccaatttacaatgctgttaacta

SEQ ID NO: 3874 - DNA, 443 bp, Protomyxzoa rheumatica
aatggaatggaacagaatggaacagaatggaagggaatggaacggaatggaagggaatgaacagaatagaatggaatggaaaatagtggagtggattggagtggcatagagttgagtgcaatgtattgcagtgcagtggaatggaatagaatggaatggaatggaatggtgaaatgatatgtgagctaagattgtgcaactgcactccaatctgggtgacagagagagtcccaatccaaataaaggagtgaaatggaatggagtcgaatggaatggaatggagtgcagtggtatggaatgatgtgcaatggagtggagtggaacagactgtagaggagtggagttgacaggagtggatcagagtgcagtggaatggaatggaatgcaatgcacaggaatggagtggagtggaatggagtgaacaggagtggagtggaatggag

SEQ ID NO: 3875 - DNA, 1086 bp, Protomyxzoa rheumatica
gcattgctgagttcttatgctatgccgactctttgccacagagagtgagtacagaggtggacctggaggacaggtctgggctgagcattgaggagggtattaccctatgtaggcaccttacctttgcccaaatcaggcgggttatcctcacccgattggccctatgcttctcaggttcctctttcagctgcacccagggttccttccagagcattgcaccttctgcagctcagggcactgccttttttcctaaactactgtggaaactgtcctgatgtctgagacactgtccattgtgcagcagccctcttttttctctagccagagcgcgtgctcaatggcttttgagagaaatcttccacatggcctgcttgtgaacagcttcagagctctgcaggggctgacaagggctgagccttcctggaaacgtcactctcaatggcgcctttttcacgaatgtgaaagtcgaggcatcaggaagttagtttaatgggttgcagaaaatctaagagcaagggagaaaacccgctttccaaggcgtgagttttgtgagccattttcatcaacccatttaagtggacaagctccaaaatgtaacctgaagctgctgactatttaggcattttacaattaaaatcatcggtctcatcccaagtcgtgcctcacttgccagtgtctcagagacacaaatgggacctgatccctcaggaacagatagtgttccaggttcgtgggagcgacttttaagttgtggagcacttggggtcgtttgaaacccactatcttcagtagggacttttacgtctagagagcatgtgcattttgattttatctgtcttcaagctgaacctttgctcattttaacaagtaaaaacacattcctgggtgaaatgtcattgcatgctaatgagacatgaaacatatgcaaaaatatgtacagctactgcacatgtgcacccagaagaccactcaaagcatgccttctataacacttctttccaccttcttatgaataatcatgtaaaactcccagaaggagggtttctccagcaacaattaatgctgtctcactcttatgagcaggct

SEQ ID NO: 3876 - DNA, 183 bp, Protomyxzoa rheumatica
ttatatcacctgggttatcagtgcagtgatatatcacgatgccatgtggccagagcctagaataaatttacagcccctgggagatcagtgcagaaatatgtcacaatatccccagtaggcagagaacaggctggagttggatcacctcgggatcagtgcagagacatgtctcaatccccctgt

SEQ ID NO: 3877 - DNA, 171 bp, Protomyxzoa rheumatica
cacacatcacaaattagtttctgagaattcttctgtgttgtttttctgtgaagatatttccatttccacaataggactcaaagcgctccaaatatccactttcaggttctacaaaaagagtgtctccaaacagctcaatcaacagagagattcaactctgtgagatgaatg

SEQ ID NO: 3878 - DNA, 193 bp, Protomyxzoa rheumatica
aaaggaaatatcttcaaatagaaactacacagaagcattctcacaaacttctacgtgatttgtgcattcatctcacagagttgaacctgtcttttaattcagcagacttcaaacactctttttgtagaatcagcaagtagatatttggtgggctttgaggctttttggaaaaggaaatatcttcacataaaaa

SEQ ID NO: 3879 - DNA, 326 bp, Protomyxzoa rheumatica
catctcacagagttgaacctttcttttgattgagcagtttagagacacccttttgtaaaatctcccagtggacattgggagcactttgcggcctatggtagaaaaggaaatatcttcacataaatttttgacagaagaagtctgagaaacttctttgtgatgtgtgcattcatctcaaagagtgaaacctttcttttgatggagtagttttgaaattttcttttcgtggaatctgcaaattgacattaggagcgctttgaggccttaggaggtaaaggaaatatgttcacataaaaactagactgaaaaattctgagaacctgctt

SEQ ID NO: 3880 - DNA, 125 bp, Protomyxzoa rheumatica
cactccattccattccttttcattcgaatccatactattcagctgtattccattcctttcgtgtcctttcaattccattgcactacattggagtccattccattccattccattcgagtcctttc

SEQ ID NO: 3881 - DNA, 254 bp, Protomyxzoa rheumatica
attgcattctttctattccattccattgctttccattctatttcattccattaaattcaattccatgcttatcaattacatagcaatccattacaatcgagtccgttctatttcagtccattccttcccggtccattccgttggattccattccatttgattccattccatactattgcattctatgcgaagccattatattcgaataaattccattccaaaccattcctttcgaatccattctatttgagtcc

SEQ ID NO: 3882 - DNA, 634 bp, Protomyxzoa rheumatica
aaaattttaataaatatgtagcacctacaagacattttattaatagcttacataatgtggaaatttgagcaatttattttagaatttttgaatctaaaaatcaccagcttgacattcatttgagaaagtgaaacataaaggagagtaacataagcaagatgacagaatgtgaggttctgcatccacatcccccacgacataatgcagctgccacagcaaacataagtgcattcatgaaagccttggaatccagttcagagtttgtggcacccagctggaggcaaagaccaaggaagacattttcagagggtgagcacttgaccaagtggcaagcttgccaatcatggtcccggcttcaaaacagaatactgccacatcttactgtagacttggctataactcatttgaccttggtcctgccactgcaacaatctgtgaaaaacacaagagaattcatactcacctgagacttaggtgacaggcctgcagaacttggttctctctatagtccctgaatcaggcaaaacacaccttctttccttctccagccatggtctggaagaaatcttcacattgatatgatgaaatgctaactaacaatatgaaaaatactaaagtataaatgtcactaaaa

SEQ ID NO: 3883 - DNA, 322 bp, Protomyxzoa rheumatica
taggcctcaaagcgctccaaatatccacttgcagattctgcaaaagagagattaaaaactgctcaataataagatagtttcaactctgtgagttgaatgcatacatcacaaagaaatttctatgaatgcttctgtgtagtttttatttgaagatatttccttttccaccatggggctcaaagagctccaaatatctacctgcagattttataaaaagagagattcaaaactgctcaatgagaaaataagttaaactctgtgggttgagtgcacacctcacagagaagtttctcagaatgcttctgtgtagtttttatgtgaa

SEQ ID NO: 3884 - DNA, 229 bp, Protomyxzoa rheumatica
attaacttataagcagtaagcaaacaccatctatgctaagagatccccctggcatctcctttgctgactgaaatcccctgcagcacttcatgcacagtctaaggttcaaattccactaatttagatacccaattttcactaaggtcagttccccccgaccattcaattgccaagagggagaactggaggagtttctatcctggaatgtgggaagtccctgagcttccag

SEQ ID NO: 3885 - DNA, 81 bp, Protomyxzoa rheumatica
actgagattttctgagatagtttatactggattcccaaggctccaccttatggtgacatttgtgctgcaaaggaattctgc

SEQ ID NO: 3886 - DNA, 140 bp, Protomyxzoa rheumatica
atggaatggactcaaatagaatggactcgaaaggaatggtaacgaatggaatttattcaaatagaatgtaattgaaaggaattcaatagtatagaatggaatggaatcgaatggaatggaccggaatgaaatggactgga

SEQ ID NO: 3887 - DNA, 362 bp, Protomyxzoa rheumatica
tatccacttgcagattctacaaaaacagtgtttcaaaactgctcaataaaacggtaggttcaaacctgtgagataaatgcacatatcacaaagaagtttctcagaattcttctgtgtaatttttatctgaagatatttccttttccaccataggacacaatgggctccaaatatccacttgtacattctacaaaaagagagacgcaaaactgctcaaagaggacatatgttcaactctgtgagttgaatgcacacgacacaaagaagtttctcagaatggttctgtgtagtttttatgtgaaaatatttccctttccacaatatgcctgaaagctctccaaacatccccttgcagattctgc

SEQ ID NO: 3888 - DNA, 149 bp, Protomyxzoa rheumatica
tcacagctagcttctttctagtttatatctagggatattcagttttctttcttaggcctcaatgggttctgaaacgtgcctttgctgagactccaaaatgtgtggttccaatctgcttaatcaacagcaaggtttaactctgtgagatg

SEQ ID NO: 3889 - DNA, 376 bp, Protomyxzoa rheumatica
tggaaaaggaaatatcatcacataaaagctcgacagaagcattccgagtagcttctttgtgatgcgtgcgttcatctcacagagttgagcctttcttttgattgagcagttttgaagcacacttcttgtggaatctgcaaatggatatttggagcgctttgcagcctatgggggaaaaggaaatatcttcgtataaaagctagacagaatcactctgagaaactgtactgtgatgtgtgcatccatctcacaaaggtgaaacttccttttgattgagcagttttgaaacactctttttgtacaatctgcaagtggatatttggagccctttggggcctttggtggaaatggcaacatcttcacataaaaagcacac

SEQ ID NO: 3890 - DNA, 258 bp, Protomyxzoa rheumatica
gatatttccttttccaccgtaggcctcaaagccctccaagtatccacttgtaaattctacaaaaagagagtttcaatacttctcaatcaaaagaaaagttcaactctgtggggtgaatgcacacatcaaaaaacagcttctcagaatgcctctgtctagtttttatatgaagatatttcctgttccaccataggccacaaagcactccaaatatccattttcagattccacaaaaagagtgtttcaaaactgctctgt

SEQ ID NO: 3891 - DNA, 81 bp, Protomyxzoa rheumatica
agtgagaagtgattgaaaagagctttaggacagcttagatgcccagtgggtgaatgccagaccaaggatacccagagctac

SEQ ID NO: 3892 - DNA, 343 bp, Protomyxzoa rheumatica
cccagtgggtgaatgccagaccaaggatacccagagctacctgccatcaagttgttgggttcccaagatgtgggtgtgagagaaagaaagagagcatgtgtgttttgtgatgaactgtgggcccaatatatagtgtttcagtaggggagaagctgaaggacaaagactcttcccaagctagcttgtctcctctcctgtcaccctatgagcccctgagatccatagggatgaagagtattgaaggctccattgcaaacctggtctttctacagtgctacaaggcctatgccaaagagaaaggaaaggtacgtctttgggtgttccaggcacacatctttctgaa

SEQ ID NO: 3893 - DNA, 573 bp, Protomyxzoa rheumatica
gtctagtttttctatgaagatattgccttttctaccacaggcctcaaactgcactaaatatccacttggaaattctaataaaagagaatttcaaaactgctctatccacttgcagattcttcaaaaagagtgtttccagactgctcaatcaaaagaaaggttcaactctgttagttgaatgcacacattacaacaaagtttctcagaatgcttctgtctagtttttaggtgaagatattcccttttaaactgtagtctgcaaagcactccaaatatacacttgcagattctacaaaaagagtgtttcacagctgctcaatcaaaagaaaggctgaactctgtgagatgaatgcacttatcagaaagaagtttcttagaatgcttctgtctcgtttttaagtgaagacatttccttttccatcataggcctcaaagcgctccaaatatccacttccagattctacaaaaagagtgtttcaaaactgaaccatcaaaagaaaggtttaacactatgagatgaatgcacacatcacaaagatgtatctcagaatgcttctgtctagtttttatgtg

SEQ ID NO: 3894 - DNA, 127 bp, Protomyxzoa rheumatica
caacaagtctggaatccatccgaatttaaattaacaggcgctcctatgaattccatcagagaacacacagtagatgctttagcaacctcttcccatgcctccgaagtatctggtttgcattgtggtg

SEQ ID NO: 3895 - DNA, 168 bp, Protomyxzoa rheumatica
ttcactgctggtcactcagtcgatcccaagggcctcgcagaggggtgacatccggcaccacagtctgaggatgaaggaggccagtgtcagcactatagcctaaggatgaaggaggccagtgcttcctgcagatgagaattgcagcgtgtacacatttgactccattcg

SEQ ID NO: 3896 - DNA, 136 bp, Protomyxzoa rheumatica
aaaccttactcttgattaagcatgttggaagcactcttttcttaggatctgtgaagtggcatttgggaacccattgaggcctatgggaaaaactgaatatccttagataaaaactagaaagcatctatgtgtgaaa

SEQ ID NO: 3897 - DNA, 179 bp, Protomyxzoa rheumatica
tacataaagaaaatgagatatcaaaagatttttagaaaccaacaaaaactgtgtatctgaataacacgataactgtattaaaatttcaatcaacagtcacaaaagcagactaataaagcagaaaaaatcatacaactgatgtcactgtagttataaatactgagtcatgaaaacaaatt

SEQ ID NO: 3898 - DNA, 533 bp, Protomyxzoa rheumatica
agaggagagttgcatcacctaagtgatgaacaaaaagatatgtcataatacccaggtggaaatgggccatgcaggtaagtcacattacctaggtgttggacccagtgatatgtcacaatacacaatatatgcagggcccagccaagaggggagagtcaaatcacccaggtgctgggcccgatgatacattgtaatctgtctttggtcagagccctagccgtagaagaaactcacatcacctccatgctgaggtcagccatatgtcacaataaccctgagaaatgagcccaggaaaagagtcacatcatttaagtgagaggcccatagatattttcaattcctcctgtgggtagtcctcagtaaaaagacagtcacattagttagagtctgtccccagcgatgtgtaagaatcccagctgtgaacaggcaccagacaggacaagagagtcccatcacctgggtgaacagtgcacagatatgtcacaatgaccccatgtaggtaaagtctagacaagagttacatcacctgggtg

SEQ ID NO: 3899 - DNA, 88 bp, Protomyxzoa rheumatica
ttagaacaaagcagcagtgttctagaatcttatgtgaggggcaaagttttagaacaaagcagcagtgttctagaatcttatgtgaggg

SEQ ID NO: 3900 - DNA, 419 bp, Protomyxzoa rheumatica
gaatgcagtgaagtggagaggagtggaatgaagtgaaatggaatcagatgtaatggaatgtactggaatggagaggagttcaatgcaatggacgaaatggaacacaacggaatggaacaaaacggaacggaacggaatgggtgctgagattgttccactgcactacagcctgtgtgacagagggagatcctgttgaaagaaaggagtggaatgggatggcgtggagtggaattgagtggaaaggagtggagtggattagggtggaatgaagtggagtggagttgaatggagtggggtagagtggaatgcaatgaagtggagaggagtggaatggaatggagtggagtggaaaaaacaggagtggagtggaatggacagcagtggaatggaaaggaatggtgtggaatggaaaggaatgg

SEQ ID NO: 3901 - DNA, 165 bp, Protomyxzoa rheumatica
tgcatcacctcggtgatcagtgcagagatatgtctcaatgtcccctgtcggggaagcctatacaagatttacatcatcccggtgatcagtccagtgatatgtgaaaatgcccctgtaggcagagcccagaaaagagttacatcacctgggtgatctgtgcagaga

SEQ ID NO: 3902 - DNA, 232 bp, Protomyxzoa rheumatica
cttgtctaggctctctctatggggacattgtatcaaatatctgcactgatcacccaggtgatgttactcttttcttggctccacctacaggggatattgtgatgtaactctacacagatcacctaggttatgtaactcttttccactgtctgcctacagggtcattgtgaactatctctgcactgagcatccaggtgataggactcttctctatactctgcctggaggggga

SEQ ID NO: 3903 - DNA, 161 bp, Protomyxzoa rheumatica
gattccgttcgagtccattcgatcattccattcgagtccctttgttgattccatccaatttcatttgatgatgattccattagagtccattcaattattccatgcgattacatttgatgattacattggagtccatccgattattccattagagtccaatc

SEQ ID NO: 3904 - DNA, 172 bp, Protomyxzoa rheumatica
gtgaagatactacttttccaccatagtcctcaaaccgctcagaaatatccctttgcacattgtataaaaagactgtttatagactgctcaaagaaaagaaagattcatctctgtcagatgaatgcacacaaaaaaactaagtttctcggaatgcttctgtatagtttttatg

SEQ ID NO: 3905 - DNA, 308 bp, Protomyxzoa rheumatica
cactcaaaacatccaattgcagattctacaaaaacagtttcaaaactgctcaatcaacagaagggatcaactctgtgagatgagtgcacacatcatgaagaagtttctcatatttccttttccacaataggcctcaaagcactccaaatatccacttgcagattctacaaatcaaatgtttcaaatctgctcaatcataagataggtttaactctctgatatgaaggcacacatcacgaagaagtttctcagtatgcgtctctgtagtgtttactagaagatatttccttatcgtccataggccacaa

SEQ ID NO: 3906 - DNA, 136 bp, Protomyxzoa rheumatica
aaccccagaaaaatccagggtaatagtaagtacaaaataagatgttaaaaacaaaatatataatcacattcacagtgaaaacatagtaggctgggcgtttttgctcatgtctgtaatctcagagctttgggaggcc

SEQ ID NO: 3907 - DNA, 132 bp, Protomyxzoa rheumatica
ctctctgagacgaatgcacacattgcaaagaagttacccagaatgccatggtgtagttttttcgtgaagttatttacttttccacagtatgcctcaaagcgctcctattatccacttgcagattccacaaga

SEQ ID NO: 3908 - DNA, 130 bp, Protomyxzoa rheumatica
tcgaatggacttgaatggagtcatcgaatggactctaatggatcaaatggaattaaatggaatcatcaaatgcactcgaatggaatcatagaatgtactcgaatgaaatcaacgaatggacacgaatgga

SEQ ID NO: 3909 - DNA, 489 bp, Protomyxzoa rheumatica
gctgagagaagttgctgttagtcctaggggaaattttcatatccgttgcaagctcttcaagtatttgtgtattttcccctttcagaaagttgtgtttatctcagcatcccattgtcatctccaaaattaaataattgtgaaggatctaagatttcatcctatttgtaaacaaacctattaatcttccattttcatggatgctggtagaaggcataaggcactgaagtatgaaaacaaacctactatttactgtctacctggaggcaaaagcctcatttttgtattagttctccttgtccatactacattttttagagggacttcaaaaggctcagatggacattgcacatggggaagatttgtgtcacagctgagcagactcaagactaagaaacctcaatcttcttaaagtaggttacatgcaaacctgtccaacctttgcctcacagagaaaaattgtctttattatattgattgagtaatttatct

SEQ ID NO: 3910 - DNA, 480 bp, Protomyxzoa rheumatica
ctgaaacagtgctggatgaatgcctcaaggggctcacaaaacctattccgagacttggtgaccattatttgtgtccatgttcaattgagtttaaatatattatttaactttttctgcgtattcggtcccaactgatactcaaatgtaggaaaatacccttacagatatacgaggaatacataattggtagaggttacagaagcagggtaagcagaggagaattaaaacacagttaataaaaaccgcacccaccaaggccaacgccaatgccagttggacagccaattcatgatggggtcctgacagttagattttgttttgcttgtccttgcatgtcttgggcgaggagagtaatattgtgagaactgtcagggatacacacacaaaattcagtatgcagcaaggctgaaaagctccttgggctgcggtaaacatacctaatgccattcgattttgcaacacaacagtacacagctgaac

SEQ ID NO: 3911 - DNA, 323 bp, Protomyxzoa rheumatica
cagtgacaaaaatcatataaataacaccattacggagcattttaaaaaatctacacttaagttaaaaaaaactattagacttaatacaaaaaaatgaattttagcttcagatgttagcaatttttaaaaattatacataatgaacaccccccaaaggcaatgtagggttcattcaaagaagaacccataatttcaaagaagaacctctatttctctgtgtttgaatgtaaatttaaaagtacttgtttcataatgtgctgttgagacaatatgacattgggaaattccattataaatatacaaaaatcaactcaaaatcaagg

SEQ ID NO: 3912 - DNA, 322 bp, Protomyxzoa rheumatica
aattaccctttcaaaagattcattaagttgcctgtaaatcacaatgtagaccaaagtatttatgcagtactttagagactctcaataatgacaaatatccaggtttctctctagtagaaaagaacagatgagtaccaaatagtttgcattttatcatctaacgtgcttcaaaaataaaattttaagcatgagaattacactcagagcagtgagatgttcatactctgagaggcatttaggatgtgaaagtgagaaaacaagattttgtgaatgtagtcttgggattactcactgtgtgtctttcagccacttcccctctccc

SEQ ID NO: 3913 - DNA, 242 bp, Protomyxzoa rheumatica
aatggtgaaaagaaatgtgagctgagattgtgccactgcactccagtctttgtgacagagtgagatcttgtggaaaaaaaggaatagaatggaataaagaggaatggaatggaagggaatggaatggaatggaagggagtggattggagtcgagtggaatggagtggaatggaatgtgatggaatggaatggcaaggattatggtggagtggagtggattggagtggagtagagtggaatgg

SEQ ID NO: 3914 - DNA, 165 bp, Protomyxzoa rheumatica
agtcagtcctcactgtacatcatagaactcagactggagaaaaacctttcgaatgtaatcagtgtgggaaaactttttgttacaagtcaaacctcaatatgcatcagggaattcactcaggagagaaaccctgtgaatgtgatgattgtaggaaaactttttacc

SEQ ID NO: 3915 - DNA, 181 bp, Protomyxzoa rheumatica
aatctaagttttttcctttgttattttctacagttataattttcacattttacattgaagtctgtgacccattctgagttaatttttgtgatgggcataagatctatgtctagattcaggtttttttttttaatgtggatttctagttgtccccatgccgtttgttgaaaacagcaacttt

SEQ ID NO: 3916 - DNA, 167 bp, Protomyxzoa rheumatica
agtcaatcactgaagaacaaagttggaagacaaacactgcctaactttaagccttattcattaatcaaaacactgtgttattacccaaaagtaggcaaaaataacaatggaacaggataaatagcccagaaatacacccacctaaatacactaaactgatacaataa

SEQ ID NO: 3917 - DNA, 143 bp, Protomyxzoa rheumatica
caagtgttccatcacctagtgatcagtgcagggataagtcctaaagccccctgtagtcagagtgtagacaaatgtttcctccctggggtgatcagtgcagaggtatgtcacaaagcccctgtaagcagaaccttgacaagggt

SEQ ID NO: 3918 - DNA, 157 bp, Protomyxzoa rheumatica
gtcaaaactgctgaatcaaaagacaggttcaactctgtgagttgaatgcacacataacaagaaatttcatagaatgcttctgtgtagtacttatgtgaagatattcccttttccacaacaggcctcaaagctctccaaatatccacttgcagattct

SEQ ID NO: 3919 - DNA, 335 bp, Protomyxzoa rheumatica
gagttgaaccttccttttgagagagcagttttgaaacagttttttgtagtatcctcaagtggatatatggagcgatgtgaggcttaagatggaaacgggaatatcttcacatgcaaactagaaagaagcattctcagaaactgctttgtgatgggtgcattcaactcagagacttgaacatttctttagacggagcagtgttgaaacacacatatgcagaatctgcaagagttcatttggagcgctttgatgcctatggtggaaaaagaaatatcttcacataaacactaggaagaagcgttctccgaaactcctttgtgatatgtgtgttcaat

SEQ ID NO: 3920 - DNA, 155 bp, Protomyxzoa rheumatica
tgcatgttttgcacatgtaccctaaaacttaaagtataataataataataataataacaataaacattgagagatgaatgcacacatcacaaagtattttatcagttatcttccttctagttttaatcttgggatattcaccttttcaccattca

SEQ ID NO: 3921 - DNA, 184 bp, Protomyxzoa rheumatica
atggacatttgggagctcattgaggccaatggtgaaaaagccaatgtcccaagataaaaactggaaagcagttgcctgaaaaaccgctttgtgatgtgtgcattcaacctgcagagttaaaactatcttttgatttagtatgttggaagcagtgtttttgtagaatctgcaaaaggacatttgg

SEQ ID NO: 3922 - DNA, 145 bp, Protomyxzoa rheumatica
tttcctatgtggtggttgcagtagaaatcaactcagtgtgtgagcaagttcattgtcttctatggggttataatggttgaggtctcttaaatcttatctcattcatctgtggcatgcccgtgtttatttgcttttccccagtgat

SEQ ID NO: 3923 - DNA, 278 bp, Protomyxzoa rheumatica
gctttcaaaatatgttatttaaaaaattatcctctgtattgtccatatgcagttataaatacgtttcatggttacgtttgattcctcagtttacatatttgattattgtaccaagcagagtacctttgaaatgtttttccatttaaaaaatatgaatcttggctcaggcctgtaaccccaccaaatttggaggccaaggcaaggggatcacaaggtgaagagatcaagaacatcctggccaatacagtgaaacgctgtcactactaaaaatccaaaaa

SEQ ID NO: 3924 - DNA, 558 bp, Protomyxzoa rheumatica
ctggaatcctatgtgagggacaaacattcaaacaacagcgggagtgtccttgaatcatatgttacggacaaacattcagacccgcgtagcagtgttctggaatcctttgagagggacaaacattcaaacaactgcgggagtgttctgtaatcctatgttatggacaaatatcagacccttgtcgcagtgttctggaattctatgtgagggagaaacatttagaaaccagcagcactgttctggaatcctatgggatggacacacatgtagaccccagcagcattattctggaatcctatgagacagacaaacattcagaccctagcaacagtgttctggaatcctagaatagggataatcattcagaccctggtagcagtattctggaattctgtgtgaggaacaaacattcagagcctcatagcagtgttctggaatcctatgtgattgacaaacattcagacaacagcaggagtgttctggaatcatctgtgaggaacaaacattcagaccctcttagcagtgttctgtaatcctatgtgaaatcatcctatgtga

SEQ ID NO: 3925 - DNA, 261 bp, Protomyxzoa rheumatica
cattctgagaaacttctttgtgatgtgtgcattcaacccacagaattgaaccttccttttgatggagcaattttgaatcactctttttgcagaatttgcaagtggacatttggagctctttgagaactgtggtggaaaaggatatatcttcaaatagaaaatagaagcgttctcagaaacttcttcatgatatgtgcattcaactcacagaattgaaccttcctttgaaagtgcagttttgaaacactctttttgtagaat

SEQ ID NO: 3926 - DNA, 134 bp, Protomyxzoa rheumatica
agttgaatgcacatatcacaaagaagtttttgagaatgattctgtctggtttataggggaagatacttccttttccaccgaatacctcaaaaagctcgatatgtccacttgcagattctacgaaaagagtgttt

SEQ ID NO: 3927 - DNA, 400 bp, Protomyxzoa rheumatica
ccattccatcccattccattccattcgaatccattccagtagattcctttccattcaatgcaattccgttcgagaaagatgcattcttttctattccattcatgtacattcgatttgatttcatttcattcaattctattcctatctattttattccagtcaagtccattccattccagtccattacgttcgagtgttttccattccattggtttccattctattcaattccattcctttcaatttcattttatttgattccattccttttgagacctttctattccagtcttctccttttgaatccattactttccagtccactccattttattccattccattggaatccattccaatggcgtcctttacattcgagtccattccattcgagtccatt

SEQ ID NO: 3928 - DNA, 130 bp, Protomyxzoa rheumatica
gtgattcaactcttgactaggatctgcctacaggagtattttgaaatatctctgcactgatcaaataagttatgtaactgttgtctaggctctgcctgcaggggcgttttcacatatccctgaactgatg

SEQ ID NO: 3929 - DNA, 167 bp, Protomyxzoa rheumatica
tatcccttggcagattctgcaaaaccagtgtttcaaaactgctgaatgaaaagaaaagtttaactcagagagaagaatgcacacatcacaaagcagtttctcatatagctcacttctactttttatctgttgatattccctttttcaccattggcctcaatgagcaa

SEQ ID NO: 3930 - DNA, 374 bp, Protomyxzoa rheumatica
ttctcagaatgcttctgtgtagtttttatgtgaagatgtttccttttccacaataggcctcacagcactccaattatatccttgcagattccacagaaagagtgtttgaaaactgctcaatcaaatgaaagtttcacctctgtgagaagaatgcacacatcccaaagaagtttctcagaatgcttctgtgtagtttttatatgaagatatttgcttttcctcagtatgcctcaaagggcagcaaatatccacttgcagattctacaaatagagagattcaaaactgctcaatgagaagaaaagtttaactctgtgggttgaatggactcctcataaagaagtttctcagaatgcttctgtgtagtttttatgtg

SEQ ID NO: 3931 - DNA, 174 bp, Protomyxzoa rheumatica
ctctgttagctgcgtgcttacatcccaaagaacattctgaggttgcttctgactagtttttattggaagatatttcctttttcaccataggcatcaaagcgctccaaatttccacttccagatactaaaaaaaaagagtgtttcaaacctactgtgtggaaggcaatatttaac

SEQ ID NO: 3932 - DNA, 166 bp, Protomyxzoa rheumatica
ccagcctgggcaacatggcaaaacctggcctctacataaaatgcaaaaattagctgggtgtggtgttgcatgcctgtagtcccagctacttgggaggctggggcgggaggattgcttgaacccaggaggtaaatgtttcagtgagctgaaatcatgccactgcact

SEQ ID NO: 3933 - DNA, 303 bp, Protomyxzoa rheumatica
gtcaggcatttctttgtagcagtgcaaaaacagactaatacagtatatgtatttaacttagcattggctgccatcaacattataccacttcacatagaggataagaaccttaaaatagtgcccattcatttccctccttttgggttttgtgttattgttttcatgtattttgcttctatatgtgctgtaaactcacattaatttgttatcatttttggcttaaacagtcaattatcttttaaaaatgctttttaatactgtatttttgctcacatatttgccgtctttggtgctctacattct

SEQ ID NO: 3934 - DNA, 265 bp, Protomyxzoa rheumatica
aattgtacctcacataggattccagaacacttgtaagagggtctcaatgtttgtccctcacataggattccagaacaccgctacaagagtctgaatgtttgtcccacgcataggactccagaacactcctgctgttttctaaatgtttgtccctcacataggattccagaacaatgttgccagggtctgaatgtttgtcccacaagtaggattctagaacaccccagctgtggtctgaatgattgtccctcacataggattccag

SEQ ID NO: 3935 - DNA, 130 bp, Protomyxzoa rheumatica
cacagcaggagtgttctggaatcctatgtgagagacaaacattcagatcctggtagcagtgaaatggatccctatgtgaagtacaaacttttagaccgacgtgagagtgttctgtaatcttacgtgaggg

SEQ ID NO: 3936 - DNA, 345 bp, Protomyxzoa rheumatica
cagattctacaaaaagagtgtttcaaaactgctccatcaaaagaaagtttcaactctatgacatgaatgcacgcaccacaaagaactttcccagaatatttatgtgtagtttttatgtgaagacatttccttttccacaataggccacaaagctttgcaaacatacacttgcagattctgcaaaaagaaagattcaaaaatcctcaatcaaaagataggttcaactcttgtgagttgaatgcacacattgcaaagaagtttctcagaatacttctatgtagttttcatgggaagatatttccttttccacaacaggcctcaaagggctccaaatatccacttgca

SEQ ID NO: 3937 - DNA, 137 bp, Protomyxzoa rheumatica
atagatagataaaaatatagatatagatatagatatctgcaataccatttacatgggataaaaaagttgtttacccttaaaggtattgtgtgtgtgtcttttcttctcccatcagcatctcccacacagaacaggag

SEQ ID NO: 3938 - DNA, 361 bp, Protomyxzoa rheumatica
gttccattccattccattcgattacattccattcgcgtccattacattcgattccattccatttgattccataccttttgattcaattccattcgagtccattccataaaattccattctttcctttccgttcctttccagtccattcgattccagtctattctaatccactccactccactccgttgaattccgttacttcccattccatctctttccaatctatttccctccactccactaccctccattaaatgccattccaccccattccattccactccatttcaatccactctactccacttcgccgcattccatttgattccattgaatgccattcgatttcattccattcgat

SEQ ID NO: 3939 - DNA, 322 bp, Protomyxzoa rheumatica
atcaaaagaaaggttcaaatctctgagttgaatgcccacatcaaaaagttttttctgagaatgcttctatctagtttttatatgaagatattcccgtttccaacgtagtccttaaagcagtccaaatatccaattgcagattaaacgaaaagggtgtttcaaaactgctctatgaaatgttatgttcatctctgtgttggttgaatgcaaacatcacaaagaacgttctgaaaatgcttctgtttcgtttttatgtgaagattttcccatttccaacgaaggtctcaaagccgtccacatatccatttgcagattctacgaa

SEQ ID NO: 3940 - DNA, 127 bp, Protomyxzoa rheumatica
ttccagaacacttctaagagggtctgaatgtttgtccccccaataggactccagaacactcctgctgtgttcagaatgtattttcctcacgtaggattccagtacaatgctacgagggtctgaatgt

SEQ ID NO: 3941 - DNA, 359 bp, Protomyxzoa rheumatica
ctcagaatgatctgtctagattttatgtgaagatatttccttttccagcaagggcctcaaagcgctccaaatatccacttgcagattatacaaaaagagtttttcaaaaatgttcaatcaaaagaaaggttcaactctgtgtgatgaatgcacccgtcacaaagaagtttctcagaatgcttctgattagtttttatgtgaagatatttccttctgctctataggattcaaagcgctcctaatatccattttcagatactaccaaaagactgtctccacactgctcaatcaaaagaatagttcaggccgggcgcggtggttcacgcctgtaatcccagcgctttgggattacataggcg

SEQ ID NO: 3942 - DNA, 137 bp, Protomyxzoa rheumatica
tctgtttaaactttatatattagacaacatggggtaaatgacgtttggaattaatgaagcatataatcataattacatggctggttcatcatcctaccttccaaactgtgcctgaaatcagctaatggcgtaataca

SEQ ID NO: 3943 - DNA, 324 bp, Protomyxzoa rheumatica
gaatgtttgtccctcacataggattccagaacactgctatgagggtctgaatgtttctccctcatattggattccaaaacactcccgctgtgtttgagtgtttgtccctcacgtaggattccagaacaatcctgctgtggcctgaatgtttgtccctcacatagggttccaggacactgttgctgggttctgagttcttttccctcacacaggattcctgtacactgcaacgagtgtctgaatgtttgtctctcacaggattacagaacactgcttctgaggtctaaatgtttgtccatcacataggattccagaacactgcta

SEQ ID NO: 3944 - DNA, 156 bp, Protomyxzoa rheumatica
gcaaaaagagagattcaaaactgctcattcaagagataggttcaaatctgtgagttgactgcacacctcacaaagaagtttctcagaatgcttctgggtagtggagtggagaaaagtggagtggattggagtggtaaggattggaatgcaatggag

SEQ ID NO: 3945 - DNA, 146 bp, Protomyxzoa rheumatica
ttgtatgcagtagaagggaatagaatggaatgcaagcgaaaggaaaggaatggattggaatggaatggaattcattggaatggaagggaatgtagtgtaatggacaggtctggaataaagtggaatgctacggtctcgaatggaat

SEQ ID NO: 3946 - DNA, 329 bp, Protomyxzoa rheumatica
agaatggaatgcaatggaatggaacggagtgcaatcgagtggaatggaatcgaattgaaaagaattgaatgcaatagattcgaatggaatggaatcacatggaatggaattgaatggaatagaattgaatggaatcaaaagaaataaaatggattggagtgtaatggaaatatattgaatgcaattgaatggaatggactccaatggaatggactggaataaaatggattagtacggatttgaataggacagaacggaattgaatagaattgaatggaatagactcgaaaggaatggagtcgaatagaatggaaccaaatggaatggaa

SEQ ID NO: 3947 - DNA, 124 bp, Protomyxzoa rheumatica
attccattctattccattccattcgattcaattacattgcaatgcattacattcgagtcccttctcttccactccattccgttccggtccagtccatttgatttctttccattcgattccattc

SEQ ID NO: 3948 - DNA, 315 bp, Protomyxzoa rheumatica
gaaacgactcgagtggaatgaaatggaatggaatggaatctaatggaatggaattgaatgtactcaaatggaatggaatggaatggcatcgtctcgaatggaatggaatggaatggaatgcatttgaatagactcacaaaaaatggaatggagttgacacgaatggaattgaaaggaatagactgcaatggaattaaatgaaatggaatggactcgaaagaaatggaatggaatggaatggaatggagacgaagggaatagaatcgaatggaatggcaatgaatggagtggaatggaaaggagtggattctaacg

SEQ ID NO: 3949 - DNA, 129 bp, Protomyxzoa rheumatica
tgtctaggctctgcctacacgggaattctcacatatctctacactgatcacccaggtgatggaactctggtctaggttctgcttacatggggtattgtgacatatgtctgcactgatcacctaagtgag

SEQ ID NO: 3950 - DNA, 331 bp, Protomyxzoa rheumatica
aatgatggttccattcgagtccattcgttgattccattagattccatttgatgatgattccattgctgtccattcgatgattccattaagttccatttgatgatgattccattggattgcattcaatgattccattttatccctttcgttgatgattccattagattccattcgatgttgattccattcgactccatttgatgatgattccattcgatttcactcgatgattctattcgtttccattcgatgatgattcccttgtctttcaaccaatgattccattcgattcaattcgatgaatacattcgattccattcaatgatgactc

SEQ ID NO: 3951 - DNA, 238 bp, Protomyxzoa rheumatica
tcttaaagtgtatatttggagcccttgcagcccatgggggaaaaggaaatatcttcaaatataaactacacagaagaattctgagaaacttcagtaatgtgtacattcatctcacggtgttgaacatatcttatgaatgagcagttttgttacactctctttctagaatctgcaagtggattcttggagagctttgatgccttttgttggaaaggaaatatcttcacataaaaactac

SEQ ID NO: 3952 - DNA, 135 bp, Protomyxzoa rheumatica
tgattgcattcgagtccatttgatgattccatatgattccattttatgaatccattaaaatccatttgatgactccattcaagtctattcgataattccattcgagtccagtcgattattccattcgattccatt

SEQ ID NO: 3953 - DNA, 266 bp, Protomyxzoa rheumatica
ctggtcaacaaaaagataggttcaaccctgtgagttgaatgcatgcacaacaaagaagtttctcacaatagttttttgtagtttttatgtgaagatatttccttttccactgtaagcctcaaagtgcttcaaatattaaattgcagattctacagaaagagtgtttccaaactgctaaaactaaagaaaagttcaactctgtcagatgaatgcacacatcatgatgaagtttctcagaatgtttctgtgtagtttttatgtgaaga

SEQ ID NO: 3954 - DNA, 138 bp, Protomyxzoa rheumatica
tgtgaagatgtttccttttccacaataggcctaaaatagctcgaaatatccacttgcagatactagtaaaagaatgtttccaaactgcacaaacaaatgaaatgttcaacactatgatatgaatgcacacatcacaaa

SEQ ID NO: 3955 - DNA, 112 bp, Protomyxzoa rheumatica
aataagtcagagcaaagtttcacctgggtcagtatctgtaacatgaaccagtccttccaccaaccctgtacagtctcccaattgtgggttcttaatagcaccttcccctctt

SEQ ID NO: 3956 - DNA, 351 bp, Protomyxzoa rheumatica
gaattgcttgaacctgggaggtggaggttgcattgagacaagatcatggcactacactccagcctagcccacagagcaagacactgtcttgaaaaaaaataaaaacaaaaataaataaagctagccaggcatggtggttcatgcctatagtcctaggtaattaagcggttgatgcaggaggactgctcaaacccaagaagttaaggttatagtgagctatgattatgccattgcacttcagactaagcaaaagagtaagattccatctcaaaaaattaataaaaaaagttctctaaattacattgtttaagaaaagggaaaagaaaaaatatattttttaattttcaaatg

SEQ ID NO: 3957 - DNA, 222 bp, Protomyxzoa rheumatica
tctgagaaacttctttgtgatatttgcattcatctcacagatttaaagctttctttcgattgagcagtttggaaacactgtttttctagaatctctgatgggatatttgtcaacacattgaagcctatggtgaaaaaggaaatatcttcagataagaacaaataacaacctttctgagaaacctctttgtgaggtgtgcattcatctctgagagttaaggct

SEQ ID NO: 3958 - DNA, 140 bp, Protomyxzoa rheumatica
tcccagggagaagactccactgtatcctcagttaataaaactgttctctctcaccaaaaataaataaataattttgtctggtctttgaaaatgtgtatcctctgtctactggtcaaaatgctgcccatttatccgtatgc

SEQ ID NO: 3959 - DNA, 129 bp, Protomyxzoa rheumatica
atatagtatatgctgcacataaaatatcaaagtacccaaactatgtaatatatactgtacataacatatcaaagtaccaaaagtatatattacctagtgtaaataaaatatgaaggtaccacaaatata

SEQ ID NO: 3960 - DNA, 216 bp, Protomyxzoa rheumatica
gaataatcattgaatagaatctaagggaaacattgaatggaatcaaatggaaccatcgtcgaatggaatcgagtggaatcaacgaatggaaccaaatggaatcatcatcgaatgcaattgaatggaatcatcttcaaacggtatcgattggaatcatcaacgaatggaatacaatagaatcatcatcgaatggaaccaaatggaatcatcaaatgg

SEQ ID NO: 3961 - DNA, 249 bp, Protomyxzoa rheumatica
atttcctttttcaccataggactcaatacactccaaatatcaatttgcagatactacaaatgactgtttacaaactacccaatcaaaagaaagttcaactctgtgtgatgaatgcacatatcacaagaaagtttctcagaaattttgatctggtttttatgtgaagatattacctatttccccagaggcctcaatgggcccacaaatattccctttcagattctacaaaatgaatgtaccgaagctgca

SEQ ID NO: 3962 - DNA, 130 bp, Protomyxzoa rheumatica
ctgaactgatcaacaaagtgatgtacattttgtctaggctcttcctaaaggggctttttgacatatctctgcaatgatcacccagatgatgggacatttgtctaggctctgcctatgggggcattgtgac

SEQ ID NO: 3963 - DNA, 374 bp, Protomyxzoa rheumatica
atttagaccacagcagcagtgttctggaatcccatgtgagggacaaacattcagacactcgtagcaatgttctggagtcctgtgtgagggacaaaaattcaggccacaccaagagtgtattggaatcccctgtgaggaacaaacattttgaacctcctagcagtgtctggaatattatctgacggacaaacatttagaccccagcagcagtattatagaatctcatgtgagggacaatatttcagaacgtcatagcagtgttctggaatattatatgagtgaaaaatattcaaacatcctcgggagtgttctggaatcttatgtcacggacaagcattcagaccctcgtcgcagtgttctggaattctatgtga

SEQ ID NO: 3964 - DNA, 133 bp, Protomyxzoa rheumatica
ccatgctttttacatggatctgtacaacccacagatcaaactgctttctatagtggttaaactaatttacattcccactaacagcatataagcaatcccttttcaccacagcctctccagcatttgtggtttt

SEQ ID NO: 3965 - DNA, 141 bp, Protomyxzoa rheumatica
ttggaaacgggataacgtcacctaactaaacagaagcttttgcagaaacatctttgggatatttgcattcaaagtccagagttgaaacttccttcgatagctcacgtttgaatcactctttttgtaggatctgcaagtgga

SEQ ID NO: 3966 - DNA, 138 bp, Protomyxzoa rheumatica
gtcgattccattccattccatttttgtgcattccatgccactcaattccattggtgtccctcccattccattcaattcgaacctatggtatttcaacctattcgattccattttattccaatacattcctttcaattc

SEQ ID NO: 3967 - DNA, 343 bp, Protomyxzoa rheumatica
ggtttttatgtgaagatatttcctttttcacacttggctgcacaatgcaccaagtatccacttacagaatctgcaaagatagagtttcaaaactgctctataaaaagataggctcaacccggtgacttgaatgcacacatctcaaagaggtgtctcagaatgcctctgcgtactttttatgtaaagatatttccttttacaccattcaccacaaagtgctccaaacatccacctgcagatgttacaaaaagagtgtttccaaactgatcaatgaaaagaaaggttcaactctatgagacgaattcacatatgatgaagaagtttctcacaatactttggtgta

SEQ ID NO: 3968 - DNA, 150 bp, Protomyxzoa rheumatica
gcaaacactttttgtcctttctgcaaatggacatttgtgagttcattgaggccatgggtgaataagcaaatatcccaggataaaaactagaaggatgccacgtgaaaaccgctttggaatgtgtttattcatctcacagagtaaaacctt

SEQ ID NO: 3969 - DNA, 185 bp, Protomyxzoa rheumatica
ttggaatagaatcgaatggagtggcatcgaatggaattgaatggaatgcaatggaacgtactcgaatggaatgtactggaatggagcggaaacaaatggaatggactggagtggaatggacaggaatggaatggaaatgaatgtaatggaagaaaatggaatggaaaggaatagaatggaatgga

SEQ ID NO: 3970 - DNA, 281 bp, Protomyxzoa rheumatica
ttcacttgcagattctataaaaagagtgtttctaaactgcccaaacaaaagaaaggttgaagtcagtcagatgaattcgcacatcgcaaagaagtttctcagaatgattctgagtagttttgatgtgaagatattaacttctccacagtaggcctcaaagccctcaaaatatccacatgatcattctacaaaaagggtatttcataactgctcaatcaaaagaaagttcctattctgtgagatgaatgtacacatcacaaagaagtttctcagaatgcttc

SEQ ID NO: 3971 - DNA, 655 bp, Protomyxzoa rheumatica
aaacaaacaaacaaacaacaacaaaaaaagaactgcacagtgggatgggtggggaattggatgaaacaattggataagctatgtaaagaagaagtagaagaattcaggaaaaaaagacaagcagcatcagtgaggtcatgatagaaactaacacagaagaatttccaggagaagatcatgaacaataatttgaaatgcaggagtccccctttatccatgggggatacattccaggtcccctagcagatccgtgaaactgtgtatagtaccaaaccttatatacactatgttttttcctatatatacatacccttgacagtttaatttataaattaggcacagtatgatattaacaacaataaaatggaacaacatactatactaaaagttataggaatgtggtctctcaaaatatcttattctactgtattcaacacattcaaaataataaaatattcaagatattcaaaatatcttattgtcttttctgtctgcagttgactacagggaactgaaaccacagaaagcaaaactgtggataagggggattactgtacggcataagattcaagtaaggcagactggagaataaccattggagttgcatataatttaggttaatggtgagcattagaataaaccaattaagactaca

SEQ ID NO: 3972 - DNA, 165 bp, Protomyxzoa rheumatica
atcatcatctaatggaaatgaatgcaaacatcaacgattgaaatcaaatggagaaatcgaatggaatcatggatttgcctcaaatggaattatcgaatgggctcgaatggaatcattgaatggactcgaatggaatcattatcgaatggaatcaaatggaatcat

SEQ ID NO: 3973 - DNA, 189 bp, Protomyxzoa rheumatica
gaagtttctcataatgctactgtctacttttcatgtgaagatatttctctttcaccataggactctaatggctctgaaatatccctttccatattgtacaataatactctttccaaaatgctcaatcaaaagtaacattcaactctgtcagatgaatgtagacatcacaaacaagtttctcagaaagtt

SEQ ID NO: 3974 - DNA, 122 bp, Protomyxzoa rheumatica
atgggctcacaaatatccctctgcagattctacaaaacgatgattttcaaactgctcaatcaaaggaaaggttcaactttgtgaaatgaatgcacccatgagaaagaagtttctcagaatgc

SEQ ID NO: 3975 - DNA, 166 bp, Protomyxzoa rheumatica
tgcatttatcacacacagttgaactttcttttgattgagcagtttggaaacagtcatttgtattatctataaatggatatttggagagtaatgaggcctatggtgaaaaaggaaatatcttcacataaaaatcagatggaagcattcttagaaacttctttgtgat

SEQ ID NO: 3976 - DNA, 127 bp, Protomyxzoa rheumatica
tccattcaattctatttgatgatatttccatctgattccatttgacaatgattgcctttgattccattctatgattccattcggttccattcaaagatgattgcattcgattccatttgatgattcc

SEQ ID NO: 3977 - DNA, 122 bp, Protomyxzoa rheumatica
ttgcattccattcaattccattccattgcattccattccaatccatttggttacattccattccattaaattccattcaaataaattacattgcaatccattacattcgagtcctttctatt

SEQ ID NO: 3978 - DNA, 182 bp, Protomyxzoa rheumatica
ggaatcctaaatgagggacaaacattcaaaccctcataggagtgctctggaatagtgtgtgacggagaaacttttagactccagcagcagtgttctgcaatcctttgtaagggaaaaacaatcagaccctcacagctgtgttctggaatcccatgtgatggacaaacactcagaaccgagca

SEQ ID NO: 3979 - DNA, 353 bp, Protomyxzoa rheumatica
ttaacacttcttttcatagagcactttggaaacactcagtttgtaaggtttgcaactggatatttggacctctttgaggccttcgcagtaaacgggatttcttcgtgtaatgatagacagtagaattctcagtgaattttttttgtgtgtgtgtattcaactcacaggtttgaaccttcctttagacagtgcagatttgaaacacttttgtggaatttgcaaggggagatttcaagcaccttgagggcagtggtggaaaaggaaatatcttcgtataaaaactagacagaatcattctcagaaactgctgcgtgatgtgtgcgttcaactctcagagtttaacttttcttttc

SEQ ID NO: 3980 - DNA, 261 bp, Protomyxzoa rheumatica
ggcttaaacttaaagagtcctcataaattcaataattcgcccaaaagtttttcatgttcacatgacttattgatcaagctatttcatacttatctctgccacatactataaggtgtcagaatttggcataaaatttataaaattgaccaggcgcagtggctcacccctgtaattccaacactttgggaggcctaggcggttggatcatgaagtcagttcgagaccagtctggccaatatggtgaaacccgtctctactaaa

SEQ ID NO: 3981 - DNA, 246 bp, Protomyxzoa rheumatica
gtgtttccaaactgctgaatgtaaagaaaggcttatctctatgagatgaatgcatgcgtcacaaagttgtttgtcagatagcttccttctagtttttgtcctgggatattcacttttttgccttgtcttcattgagctcctaaatgtccattcacagaatggacaaaaatagtgtttacaaactgctgtatgaaaagaaagtgttaactcttttagatgaatgcacacatcacaaagcagtttctc

SEQ ID NO: 3982 - DNA, 133 bp, Protomyxzoa rheumatica
tgaaaaactgcttttttcttccattctgaatggacatttgagaactcattgaggccaatgtcgaaaaagggactatcccaggaagaagatgagactgaacctacttgagaaacctctttgtgatgtattcatt

SEQ ID NO: 3983 - DNA, 129 bp, Protomyxzoa rheumatica
aacaccctagctttaggtctgaatgattgtccctcacaaaagactccagaaaagttctgctggttctgaatgtttctctctcccataggtctccagaacactgctacgagtgtctgaatgattgtacct

SEQ ID NO: 3984 - DNA, 192 bp, Protomyxzoa rheumatica
tgagggacaaaactcagaactcagtaccattattctggaattccatttgagggaacaacactcagaccagagcaggaatgtttggaatcctatatgagggagaaacattcagaccacagtaggattgttcttgaatcctttgtgatgcacatacagccaaaccacagcaggagtgttctggaatcctatgtg

SEQ ID NO: 3985 - DNA, 189 bp, Protomyxzoa rheumatica
tgctttgggatgtgtggattcatctcaaagagttaaatccttcttttaattcagcagattatacatactctttttatagaatttgtgaaggcatatttcagacctcattgaggcctaagggaaaaaaagaagtatacccacattaaaattctactttgtgattcatgtattcatctcacagagttgaac

SEQ ID NO: 3986 - DNA, 134 bp, Protomyxzoa rheumatica
aaagtagttttaaggtaaattctttctagtttttatttaggctattccttttttcccccattggccacaatggtttcccaaatgtctcttcacagattctacaaaaagagtgttttcaacacgctaaaccaaaa

SEQ ID NO: 3987 - DNA, 135 bp, Protomyxzoa rheumatica
tttaatgatgattccattccattccattccattcgatgatgattccattctatactattttatgattcctttcaattgcatttgatgttgattccattctatttcatttgatgattctattcgaatccattcaat

SEQ ID NO: 3988 - DNA, 129 bp, Protomyxzoa rheumatica
gacctgtaactgggatctacacacgtgtgctcgctgtagctcacttaccattttccctcaaaaacaggcctgtaagatccctcactgtagtgcgcgttgccctgcctctttaaaaacgccgttgactct

SEQ ID NO: 3989 - DNA, 129 bp, Protomyxzoa rheumatica
ttgtctaagctctgccttgagggatattgggacctatctctgcactgatagctcaggtgatgtaaaacttgtctacattttgcctacagtgggatttagacatatctctgcactgatcacccaggtgat

SEQ ID NO: 3990 - DNA, 145 bp, Protomyxzoa rheumatica
gttgaacattccgtttcatggagcaggttggaaacactctttttgtggaatctggaagtgaacatttggatcacattcaggccaatggtgagaaagggaatatcctcgaatgaaaacttggcagaagcattctcataaactagtt

SEQ ID NO: 3991 - DNA, 150 bp, Protomyxzoa rheumatica
tttgtagaatctgcaagtggaagtttggagctgtttgcacgctgtggtgcaaaaggaaatatcttcatataaaaactacacagaagctttcagagagacttctttgtgaggaatgcgttcctcacacagagttgaatcttcctttttatt

SEQ ID NO: 3992 - DNA, 293 bp, Protomyxzoa rheumatica
atggctataataaaaataaataaataaataaatcaagaactaatgaggatataaaaaagagtggatgtataccttgttggtggaattgtaaattagtatggccattatagaaaatagtatggaggtttctgaaagaaattaaaaatatatctattatatgatccagcaattttacttctgggtgtatatccaaaagaaaggatattactgtgtcaaaaagatatttgcattcccatgttcattacagaactatttataatagcttatatatggaatcaattcaaatgtacagc

SEQ ID NO: 3993 - DNA, 131 bp, Protomyxzoa rheumatica
gcattccattcgattccattctattcgaataaattccatttgattccattcctctcgattccattctatttgaatccattccattcgagtccatcacctttgcgtccattccattccattccatttgatgc

SEQ ID NO: 3994 - DNA, 257 bp, Protomyxzoa rheumatica
cgaaaggaatggtctcgaatggaatttattcgcatagaatggaatcgaatggaatgcaatagtgtgcaatgaaatcgaatggaatggaccggaatggaatggagttgaatacaacggattcgaatgtaatgcatgacaatataattgatttaaatgcaatggaatcgaatggaatgtaatcaactggaatgcaaaggaatgcagttgaatggaatagaatgtaatgcaatggaatggaagggagtggaatcgtgtgg

SEQ ID NO: 3995 - DNA, 700 bp, Protomyxzoa rheumatica
cagacccttgtagcagtgttctggaatcctatgtgagggagaaacattcagacaaccgtagaactgttctggaatgtgagtgacaaatattcagtccccagcagcagtgttctggaatcttatgtgagggaaaaacattcaaaaaacagcggaagtgttctggaatcctacgttagaaacataaattccaagtataataataataaacgaaataatataacataaaaagaaacatacattcagaccctcgatgcagtgttctggaatctatgtgagggagaaacactcagaacccggcctcagtgttctggaatccgatgtgaaagacatacacatagactcctgcagcagtgttctggagtcctatgtgggggacaaacattaagaccccagaagcagtgttctggaatcctacgtgagggacagtcaatcagaccctcgtagtagtgttctggaattctgtgtgagggacaaacattcagaccctccttgcagttttctggaattcaatgtgagggacaaactttcagaccacagcaggggtgttgtggaatccccggtgaggaacaaacattgagacactcgtagcagtgttcaggaatcctatgtgatggacaatcatttaaaccccagcagcagtgttctggaatcctatgtgagagagaaacattcagacactcgtagcagtgttctggaatcc

SEQ ID NO: 3996 - DNA, 207 bp, Protomyxzoa rheumatica
taggattccagaacactgctacgagggtctgaatatttgtcctccaagttggattccaaaacactcctgctgttttctgaatgtgtgtccctcacatagaattccagaacaatcctgctgtggtctgaatgtttgtccctaacatagtgttccagaacactgcagctgggttctgagtgtttgtccctcacataggattccagaaca

SEQ ID NO: 3997 - DNA, 136 bp, Protomyxzoa rheumatica
ccttttttgccattggcatcaaagagctccaaaatgtccattcacagaatggacaaaaacagtgtttctaaacagcggaatgaacacaaatatttaactcgtgagattaatgcacacatcacaaagcagtctctca

SEQ ID NO: 3998 - DNA, 130 bp, Protomyxzoa rheumatica
acaaatatcttcacataagaactacactgaggcattctgataaacttcttcatgatgtgtgcattcaactcacatggttgaaactatcttttgattgggcagtatttaatctctctttgtagaatctgca

SEQ ID NO: 3999 - DNA, 191 bp, Protomyxzoa rheumatica
cacagatttaactgtgatgaaatcccttcaacagatgtatattgaacacctactatgtataaggacacactgtgttattagatagggtataaagaaagtcacagttccccagaggtaggcactgccatagctgaagagccaacccaagttgctgttgccagtggggaaagggctgggtgtcagagaagaag

SEQ ID NO: 4000 - DNA, 508 bp, Protomyxzoa rheumatica
cactcttttgccttccaccatgtaaggatgcaggatgaagtctctcgtcaggcaccagatgacagtgccttgatcttggacttcccagcctccagaactgttaagaataaatttctgttctttattaaataccaagcctgaagtattttgttgttccagcacaaatgaagccatacttcctgtacagcctgtggaactccatgtatataaaaatgtaaaacagttaaacttacaaagacatagagctcaatcgtggttaccaagggctgagagggaagggtaactggggaggtatttgtcacagagtataagttttagttatgcaatgagtaagttctaaatatggaatcttcagatcaaagcatgtagttaatacggaattgcatatttaaaaatttgttaagaggatggtatggtttcaatctgtttacttgcccaaatctcatgtcaaattctaagcctcaaggctggaggaggggcctggtgggaggtgactggatcaaggggc

SEQ ID NO: 4001 - DNA, 136 bp, Protomyxzoa rheumatica
agctcaaatgaagccatgcttcctgtacagcctgaggaactccaagtatataaaaatgtaaaacagttaaacttacacaaacatagagctgaatcttggttaccaagggctgagggggaagggtaactgggggggt

SEQ ID NO: 4002 - DNA, 135 bp, Protomyxzoa rheumatica
ctttctgagaaactgctctgtaatgtgtgcattcatctcacagagttaaaccttatcttgattcagcaatttagagacactgtttatgtactttcaacgaatggacagttggcagctcactgaggccaatgatga

SEQ ID NO: 4003 - DNA, 190 bp, Protomyxzoa rheumatica
aaactgctgaatcaaaagaaagttttaactctatgaaatgaatgcatgcatcaaaaacatttctcagaaaggttctttctagtgtttatctgaagatatattatttttcaccataggcctcaatgcactttcaagtgtcctttcacataatgtaaaaaacagtgtttccaaattgctgaatcaaaagaaa

SEQ ID NO: 4004 - DNA, 135 bp, Protomyxzoa rheumatica
cagagttaaacctttcttttgattcagcaggttggaaacactctatttggagaacatgcaaagggaaaattgggagcctattgaggactgtggggaaaagcagaatatccccaactaaaaactagaaagatgata

SEQ ID NO: 4005 - DNA, 260 bp, Protomyxzoa rheumatica
ggaatggactcgaaaggaatagactggaatggaaccctctggaataaagtggagacgaatggattggaattcaaaggaatggattcgaatggaatggaatcgaatggaatggaacggaattgaagggaatagaatggacttgaatgtaattgactgaatggaacggactcaacaggaatggaatcgaatggaatggaatcaaaaggaatggactcgaaaggaaggtaatcaaatggaatggaatcaaatggaatacaatc

SEQ ID NO: 4006 - DNA, 216 bp, Protomyxzoa rheumatica
attgaatggagttgaatggaatcgaaaggaatagactgcaatggagtgtaatggaatgatatcgaatggaatggactcgaacggaaagtaccggagtggaatggactcaaatggaatggaaacgaattgaaaggaaagggatggaatggaatagaatagaatggaatggaataggatggaacggaattgaaagtaatggagtcgaatggaatagaa

SEQ ID NO: 4007 - DNA, 163 bp, Protomyxzoa rheumatica
ttggaaacgggaatatcttcatataaaatctagacagaagtatgctcagaaacttctttgcgatgtttgaattcaagtcaccgagttgaacattccttttcatagagcaggcttcaaacactctttttctagtatctggaagtggacatttggagagctttca

SEQ ID NO: 4008 - DNA, 672 bp, Protomyxzoa rheumatica
cattcagaccctcgtcgcagtgttctggaattctatgtgagggagaaacactcagaacccagcaacagtgtactggaatcctatgtgacggacatacatgtagacccgagcagcagtgttctggaatactatgtgagggacaaacattcataacacggcaggagtgccctggaatcctatgtgagggaaaacattcagacaatcgtagcagtgttttggaatcttatgtgagggactaactttcagaccccatcagcagtgttctggaatcctatatgagggacaaacattcaaactacagaggctgtgttctggaatcctaagttatggacaaaaattcagatcctctccgcagtgctctggaattctatttgagggagaaacaatcagaacccagcagcagtgttctcgaatcctacatgagggacatacattcagaccacagcagcagtgttctagaaccctatgtgagggacaagcattcagaccgtcgtagcagtgttctcgaattctgtgtgaaggacaaagattcagaccatcagagcagtgttctggaatcctttgtgagggacaaacattcagaccacagcaagagtcttctggaatccactgtgaggaacaaacattcagaacctcatagcagtgttctggaatcctatgtgatggacaaac

SEQ ID NO: 4009 - DNA, 126 bp, Protomyxzoa rheumatica
gatatttcctttttcaccataggcctctaacctctataaatatccatttgcagatatcacaaaaacactgtttccaaactgtgcaaccaaaagaaagtttcaattctctgagttaaatgtgctagt

SEQ ID NO: 4010 - DNA, 134 bp, Protomyxzoa rheumatica
gccacaaagttctccaaatgtccacttgcagattctacaaaaacagtctttcaaaactgctctgcaaataaaatgtttcaactctgttagttgaggacaaacatcacaatccagtttgtgagaatgcttctgtc

SEQ ID NO: 4011 - DNA, 265 bp, Protomyxzoa rheumatica
aagtacccaaagcatgtattatataatgtacataaaatatcaaactacacaaatatttattgtgaactcgaaataaaatatcaaattaaccaaactatataatatatattgtacataaaaaaccaaagtacccaaaccatatattttatactgtacataaaatatcaaagtacacaaaatgtatattctatactctacataaaatatcaaagtacccaaacatttattatatactctacataaaatatcaaagtacaccaaatat

SEQ ID NO: 4012 - DNA, 135 bp, Protomyxzoa rheumatica
ttccattccattagattccattcttacaactgcattgcattcgattcaattctatttgaataaattgcattccagaccattcctttcaagtggattgtatttgagtccattccattcaagtgcactacatttgat

SEQ ID NO: 4013 - DNA, 144 bp, Protomyxzoa rheumatica
aaaagattccagaacactcctgctgtggtgtgaatgtttgtccctcgtttaggatttgagaacactgctgttgggttctgagtgcttgtccctcaagtacatttcaagaacactgctaggtgggtgtaaatgtttgtccctcac

SEQ ID NO: 4014 - DNA, 300 bp, Protomyxzoa rheumatica
acaaaggacaacaaatatccacctgcagattctacagaaagagagtttcaaatctgctcattcaaaagatgggatcaactctgtgacttgaatgcacacttcacaaagaaatgcctctgaatgcttctatgtagtttttatgtgaagatatttaattttccataataggccacaaaacactccaaatatccaattgaatgttctacaaaaagtgtgtttccaaattgctgaataaaaaggaaggttcacctctgtgagaggaatgcgcacatcacaaatgagtttctcagaatgcttctg

SEQ ID NO: 4015 - DNA, 518 bp, Protomyxzoa rheumatica
taattccactacactccccagccatccactccactagactccgtttgactccactccactaaactccattccactccattccaatccactccattcctctcgattccactccaacacatcccattccattccattaaaccccattgcatgccattccattccactccaccccattaccctccagtccactgcattccactccactccattccactcctcttcattctactcctctaaattccaatccactccattggactactctccattccattcaattcctttgaattccattccactcaattccattctattactcttcagtccattgctccccactccactacactccgcaccaatccactgcacaccagtccactccattccattccattcttttccattactttccatttcactccactccactccattccataccatcccattcgtttccacacccctccactccaatgcactccactacaatccactgtgttcccttccattccacacca

SEQ ID NO: 4016 - DNA, 123 bp, Protomyxzoa rheumatica
tggtgaaatgaaatgtgagctgagattgcacactgcactcaagcctgggtgataaagtgagatcctgtcgaaagaaaggaacggaatggaatggatttataatggaatataatggaatggatt

SEQ ID NO: 4017 - DNA, 574 bp, Protomyxzoa rheumatica
agattctacaaaaagagtgtttcaaaactactcaatcaaatgaaaggttcaactctgtgagctgaatatacacatcacaaaaaagtttctcagaatgtttctgtgtagtttttagagaaagacatttccttttccaccattggccacaaagggctgcaaataatcacacacagattctacaaaaagactgtttcaaaactgctatatcaaaagatcggtaaaatgctgcgagttgaatgcacacatcacaaagaaatttctcggaatccttctgtgtagtttttatgtgaagatatatccctatccaccataggcctcaaagcgctccatatatccacttgcagattctgtgaaaaaagtgtctcaaatctgttcaaacaatacaaaatttaacactgtgagatgaatgcacacattacaaagaattttcccagaatacttctgtgtagtttttaggggaacatatttccttttcctccattggccacaaagggctccaaacaaccacatgcagattttacaaaaagaaagttccaaaactgctcaatcaaaagaaagattcaactctgtgaga

SEQ ID NO: 4018 - DNA, 308 bp, Protomyxzoa rheumatica
gaatccagtgcgttccattccattgctttccattctattacattccattgcattactttgcattccatttgattacattcctttcgattgcattaatttcgaatcaattacattgcaatccattgcattcgagttctattccagtccattccagtccattcaaatcaggcccattccgttccattccattccattcgattccattccattcgaatcgattgcattgcaatgctttacattcaagtctgttttattccagtccaatccattccggtccattccgttcgattccattccattcgatgcca

SEQ ID NO: 4019 - DNA, 127 bp, Protomyxzoa rheumatica
acatgacctaggtgatcagtgcagagatacatcgcaatgtccctgtaggcagagccttgacaaaaggtatatcacctgggtgatcagtgcagggttatgtcacaaagcaccctgtaggcagatccta

SEQ ID NO: 4020 - DNA, 153 bp, Protomyxzoa rheumatica
gtgaagatatttctgtttccaccagacgcctcaaagtgctacagatatcaacttgcacattctgcaaaacgagtgtttccaaactgctcaaccaaaagaaacgttcaacagtctgagctgaatgcacacatcacaaagaagtttctcaaaatt

SEQ ID NO: 4021 - DNA, 278 bp, Protomyxzoa rheumatica
tctgcaataggacatttggagcgctttgcagcctatgttggaaaaggaatcatctcacataaaaactagacagaagcaacctgacaaacttctttgtgatgtctgcattcatctcaaatggttgaaccttactttcgattgagcagttttgaaacactcattttgtagaatctgcaattggtcatttggagcgctttgaggcctatgatgcaaaacgaaatatcttcacatattaactagacagaagcattctgagaaacttctttgtgatgtgtgca

SEQ ID NO: 4022 - DNA, 162 bp, Protomyxzoa rheumatica
ttcaactctgtgagataaatgcacacatctcaaaggaatttgtcagaatgtttctgtctggtttttatgcgaagatatttccttctccaccataggcctcaaagcactccaaatatctacttccagatagtacaaaaagtgtgtttcaaaactgctcaatca

SEQ ID NO: 4023 - DNA, 197 bp, Protomyxzoa rheumatica
tattgcccccaagttttctgaggtgtcactgatttttttcagtctattttatttttgttgtgtggattggacccattctattcatctgtcctcgagtttcctgattgcatcctctctcatttccaatgagtccatccaccgaggtttctttaaattgtattttggtgattgcatttttagttctgtaatttcctttg

SEQ ID NO: 4024 - DNA, 280 bp, Protomyxzoa rheumatica
tttgcttcctaaggccattggtctactacgttagtctttctagaaacataacatgaaacgcccatgctgccggcagtgtgttcagccagctgagcaaacaggtttttggctaaaggagtaggctctggtaacttctggtctacatgcttatagaatgacttaaagatttggagctgttgctgggctggatgggtctgggttctttgtttgataacatataggaggattgctgggtatgtatgcatatacaaatgaatggggtaacatgcagtctacatgg

SEQ ID NO: 4025 - DNA, 138 bp, Protomyxzoa rheumatica
atatcttcacataaaaactagacagaagcattctcaagaacttctttgtgatgtgtgcattcagctaacatatctgaacctttcttttgacagatcagcttttaaacactctttttgtacaatctgcaagtgttcatt

SEQ ID NO: 4026 - DNA, 175 bp, Protomyxzoa rheumatica
atcctatgtgagaaaaaatcattcagagcacagctagggtgctctggaattctacgtgtgggactagcattcagaacttcgtagcattgttccggaatcctaggttagggaaacacattcagaacacagcaggtgtgttctggagtcctatgtacgggacaaacattcagaccct

SEQ ID NO: 4027 - DNA, 171 bp, Protomyxzoa rheumatica
cccaaatgtcccatcacagattctgcaaaaagaagagtatttccaaccttccgaatcaaaagaaaggtttaactctctgagattaatccacacatcacaaagaagtttcatagacaacttttttctagtttttatctggggatgttcaattgttccccataggccacaaag

SEQ ID NO: 4028 - DNA, 161 bp, Protomyxzoa rheumatica
gtccaaatatccacttgcagatcctacaaaaagagtgtttcaataatgctctatcaaaagaaaggttgaattctgttagtggagtacacacatcagaaacaagtttctgagaatgcttcagtctagtttttatgggaagaaattttatttttcaccatagg

SEQ ID NO: 4029 - DNA, 291 bp, Protomyxzoa rheumatica
atataaatttatgtcttgtcaataatcccaaatgcttcctctaatgtaatatttcaagatcacatttataatccaccaactgtgccaaggattgggcaccctatcttcaactttctagctggtaaaataatttccagtgattcccaaagtagctaccctcaaagtcatttgaggtgcttgttaaaataaaaatcttcatgcgacttatattctgtaccctgattctaacaaaccaactagaagatggtatatttgagaaaatcagggaaatttgcttaaagactggatgtg

SEQ ID NO: 4030 - DNA, 322 bp, Protomyxzoa rheumatica
ctatggagaaaaactgaatatcccaagatagaaactcaaaagaagctatatgtgaaagtgatgtgaggtgtgtattcattttacagagtaaaaccattcttttgattcagcaggttggaaacactctttttggaggatctgtgaagggacatttgggattacattgaggccttttgggaaaaactgaatatcacagatacaaacttgaaagaatctatctgtgaaagtgctttgtgatgtgtggatttatcttgcagggttaaacctttcttccgtttcaccacgttggaaacactctttgtggaaaatctgtgaagggaca

SEQ ID NO: 4031 - DNA, 143 bp, Protomyxzoa rheumatica
atatttggatagctttgacgattttgttggaaacgggaatatatacaaaaagtagacagcagcattctcataaacttctttgtgatgtttgcattcaagtcactgagtcaaacattccttttcatagaggaggtttgagacac

SEQ ID NO: 4032 - DNA, 188 bp, Protomyxzoa rheumatica
ttggcctattgtgtaaaaggaaatatcttcacataaacctacacagatttattctgagaaactactttttgttgtgtgtattcatctaacagagttgtacgtttcttttgattgagcagttttgaaacacagtttttacagaatgtgcaagtggatatttggagcgctttggggcctactgtggaaaa

SEQ ID NO: 4033 - DNA, 641 bp, Protomyxzoa rheumatica
agtccattcgattactgtccattccattccactcctttcctttccattgcattccattccattcgactgtattccattcgagtcaattccattcaagtccattcctttctagtcatttaaattcgagtacattccaatcctttccattccattttgttccattccattggagtccattccatgctagtctattgcattacaatccattacaatcgagtccatcccattttttacgatttcattacattacgttacattcgagtctattccattcgagtccattctttggagtccattccattgcagtccattccattagattccaccccattcgattccattctaatcgactgcattccattcgagtccattttgtttaattccattccatttgagtgcattccatacaaatccttttcattcaagtccatttcattcaagtacattccattccagtcctttatattcgagtatattccattccattcgattccattccattccattccattatattctatttgattctattccatttgactccattccatgtgagtccatttgattccagtcctttccattacagtcctttacatttgagtccattccattccattccactccgtttgattccattccat

SEQ ID NO: 4034 - DNA, 260 bp, Protomyxzoa rheumatica
cccgtttccaacgaaatcctcaaagctatccaaatatcgaattgcaaattctacaaaaagagtgtttcaaacctgctgtatgaaaggaaaggttcatctctgttacttgagtgagcacatcacaaacaggtttctgacagtggttctctctagtttttaaggaatgatgtttcttttttcaccataggccacaaagctctccaagtgaccacttccagatactacaaaagggtgtttcaaaatgctctatgaaaaggaat

SEQ ID NO: 4035 - DNA, 949 bp, Protomyxzoa rheumatica
aataatatctgaaatgaaagaggggataccactacacatcctgtggacattaaacggataatgaggaaatactatgaacaactctgtgcacacatctgatcatctagttcaaatggaccgcttccttgacagacacaatttactgaaactcatacaagaagaaacacacaatccgaataacctattattttaataaccttcaaaacagaaagtacctgatcgggatgtattcattgggaaattgaccaaatatttcaggaagaaattatacccattccccacaatctatttcagatgatagaggctgttggaatgcttcctagttcattatgtgaggccagaattattccaacgacatttcaaaatagaaaaccacagaccattatctctcatgaaaatacatacaaaaatcctcaaaaacactagtacatcgaatccaacaatatatagaaagaatcatacaccatcaccaagtgggatttattctggggatagcaggctggttcaacatttgaacatcaattaatgtaattcattacatcaagagagtgaaaaggaaaaatcacatgatcaggtgcacaaaaagcagttgacaaaatccagcattcattcatgataaaatctctcaataagctaagaggggaacttcctgaaattaataaagaatatctacagaaaactacagcaaacatcataattaataatgagaaactcaaagcttttccacaatatcaggaggaagaaaaagatgtattctctcagcatccctttcaatatcatactgaaaatactagctaatgcaatgagtcaagaaaatacaattaaaggcatacagattgggaaggaataaataaaactttgttcacagatgacaggattgtctatgcagaaaatctaaaaaatttaaataaaagaaagaaaaaagaaaaaggaccaaaccgaaaaaaaa

SEQ ID NO: 4036 - DNA, 295 bp, Protomyxzoa rheumatica
tttctgtctcattccattctttcccattccattccattccacttcattcaccttcactcttctaaagtccgttcagttccattccaccctattccatttcactccattccactactctgcactccagtggaccgcattccattcgattccattcgatgccattcgaatccattccatttaattccactccgttctattccactccgttcgtttccattccattcgattccattgcattcaattccattaaatttgattccgttccattctagtccattccattcgagtcaatttc

SEQ ID NO: 4037 - DNA, 163 bp, Protomyxzoa rheumatica
ttagcgaatatcctaggataaaagcaagacggaagctatatgagagactgctatgtgatgtcagcattcatctcatagagttaaatatatctttggattcagccgtttggaaacactgttttcttccattctgcaaatggtcatttctgatctcatttaggcc

SEQ ID NO: 4038 - DNA, 286 bp, Protomyxzoa rheumatica
ggatatttccttttccaccacaggcctcaaagcgctccaaaagtccacttgcagattctacaaaaagagaattttaaactactcaatcaaaagaaagttttaactctgtgagatgaatgcacacatcaaaaacgtttcctcagatagcttccttctagtttgtaccctgggatattcctttttctgaagttggcctcaaagagctctcaaacgtccattcacagaatggacaaaaacagtctttccatactgctgaattgaaagaagtgtttaactctgtgagatg

SEQ ID NO: 4039 - DNA, 193 bp, Protomyxzoa rheumatica
gatttgtgaagtgtacattcaagtcatgaagttaaatctttcttttcattcagcagtttggaaaaactgtttctatagaatctgaaaagggatatttgggtgcacattgagacctatagagaaaaaagaaacatattcagataaaaactagaaagaagctttctgaaaaactgcattgtgatgtgtgcattca

SEQ ID NO: 4040 - DNA, 161 bp, Protomyxzoa rheumatica
aaaagtttttgtttttttcaaatatgggggactttttattatgtgacatttcttagtggtatatatcaaatttagttggtatttttaagactaatgcactttaagaatacctataatttaataaatttacttaagttggttttgtactattttctgattct

SEQ ID NO: 4041 - DNA, 416 bp, Protomyxzoa rheumatica
ccagaacactgctgctggggtctaaaagtttgtctgtcacgtaggattccagaacactgctacgactgtctaaacgtttgttcctcacagaggattccagaacactactgctgttgtctgaatgtccctcacaaaggatttcagaacactgctacgagggtctgaatgtttctcccacacagaggactccaaaacactactgtagtgttctgaatgtattttcctcacataggattcaaggacaatgctaacagggtctgaatgtttgttccacacgtgggattccagaacacctcagtggttttctgaatgattgtcccacacataggattccagaacaaagctgctgggttctgagtgtttgtccttcaaatatgtttccagaacactcctgctctggtcagaatgtttgtcac

SEQ ID NO: 4042 - DNA, 137 bp, Protomyxzoa rheumatica
tgagttgaatgcaaatatcactaattagtttttgaaaatgcttctgtccagttttaatgtgaagatacttccttttctacaatatgcctcaaagcgctctacatatacactatcaaattccacaaaaagtgtttcaa

SEQ ID NO: 4043 - DNA, 147 bp, Protomyxzoa rheumatica
aatggtgaaaagaaatgtgagctgagattgtgccactgcattccaggctttgtgactgagggaaatcctatggaaagaaagtaatggaatggaatggagtataatggaatagaatggagtggagtggagtggagtggtgttgagtgc

SEQ ID NO: 4044 - DNA, 155 bp, Protomyxzoa rheumatica
acagaagcattctgcaaaacttcctcgtgatatgttcacttatctcaccaaattgaaccattgttttcattgagcagatttgatacactctttttgtagcatgtgcaagtgaatatttggaacgctttgatgagtatgacggaaaaggaaatacc

SEQ ID NO: 4045 - DNA, 149 bp, Protomyxzoa rheumatica
gactattttaagcccactgttgagatctagtactgagaaaaaaaacagatttctttcagaatattactgcttgttgacagtacaccaggtcatccagagctctctgatggagatgtacaagtagattaatgctgtttttatgcctacta

SEQ ID NO: 4046 - DNA, 196 bp, Protomyxzoa rheumatica
tggaatggaatcatgaaatgaaatgatagctgagattatgacactgcactccatcctgggtgacagagtgaggtcttgttgacagaaaggaatagaatggaatggtgtggaatggaatggagtagaatgcagtggattggagtggaatggaatggcgtgaagtggaatggagtggagtggaatggaatgggatggg

SEQ ID NO: 4047 - DNA, 244 bp, Protomyxzoa rheumatica
aacatttggagagctttgtggcgtatgataggaaaggaaatatcttcacataaaatctagaggaagaaatctgagaaattccttttgatgtgtgcattcatgtcacagaattaaacctttcttttgattgagcagttttgaaactctctttttgttgaatctgcagttggacactgggagcgctttgaggcctaagttggaaaaggaaatagcttcacataaaaactagacagaagagttctga

SEQ ID NO: 4048 - DNA, 200 bp, Protomyxzoa rheumatica
caaagaagtttcccaggattcttctgtctagtttttatgtaaagatatttccttgtttttatgtaaagatatttccttttccaccataagcctcaatgaatttgaaatgtccacttgcagattctaccaaaagagtatatcaatactgttccatcaaaagaatgtttcaactcttggagatgaattcacacatcgcacaa

SEQ ID NO: 4049 - DNA, 157 bp, Protomyxzoa rheumatica
tgatgtagtcatgcaatgagtaatacataataaaaaacggagtatctctccccacaagcagttatagcttgtgttataaacaatccaattatactcttttagtttttttacatgtggaattatttttgactataatcaccctgttgtgctatcaaat

SEQ ID NO: 4050 - DNA, 150 bp, Protomyxzoa rheumatica
tgatatgatttcagtcttcttatttgttgagacttgttttgtggcctaacatatgacttatgctggataatgattcatgagcagttcagaaaaacatgtattctgctgcatttggatctactgttctgtctgttaggtccatttggccta

SEQ ID NO: 4051 - DNA, 258 bp, Protomyxzoa rheumatica
tttttttaaagacccaactatatatctcctacaagagactcacatcaccttgaagggcacacataggttgaaagtgaagagatggaaaaatattccatgcaaatggacatcaaaagagagcatgggtaggtatacttaacatcagataaaatagatattaagccacaaattatataaagatacaaagaaggttgttatataatgacaaggggtcaatttatcaagaacacatgccaattgaaaatatttatgcataca

SEQ ID NO: 4052 - DNA, 237 bp, Protomyxzoa rheumatica
tggaatcggatggaatagaatggaatggaatgcacttgaaaggaatgggctcgaagggaatggagtcgaatggaatttactggaatgttatgtaatggaatggatttgaatggaatacactctactggaacagaatggaacggaacggaaaggaagggactcaaatgtaatggactgaattgcaatgtagtagaatggaattgacatgaatggaatgcactggaatggaatggactc

SEQ ID NO: 4053 - DNA, 140 bp, Protomyxzoa rheumatica
ttttgtagatttccaagtggatatttagcgccatttgaggcctgtggttgaaaaggcaatatcttcatagaaaaattagaaagaatggttctcagaaactactttgtaatgtgtgcgttcaactcacagagtttaacctt

SEQ ID NO: 4054 - DNA, 205 bp, Protomyxzoa rheumatica
tagaacatcatcatgcttaagaagccagggaaaggagtaacagtaaaggaatttgtctttctttcttgttttttttcttttcactttgctctggaagtgggagttgtctggagcctattcctttggccttggcttctcaaacagtgttataactgtctttgaagtgagcttactaggcagaggaaaacttgttcttttcttttta

SEQ ID NO: 4055 - DNA, 142 bp, Protomyxzoa rheumatica
aagaatagtcctggccatactaagagtttgcccagtactcccttccctcttacccctccttgttagaagcattcaatcaactatagaggcaaaagcagctaagcaaactaccactcagctaatggatctatataaatatcag

SEQ ID NO: 4056 - DNA, 140 bp, Protomyxzoa rheumatica
atcatcgaatggaaacaaatggaaacatcatcaaatatactcaaccggaaacatagaatgtaatcaaatataatcatcatcgaatgtaaaagaatagaataatcaaacggaattgacttgaaacaacatcgcttggaatt

SEQ ID NO: 4057 - DNA, 269 bp, Protomyxzoa rheumatica
gtggagtgcagtggaatcgagtggagtggagtggaatggagtagaatggaatggagtggagtgtagtggaatggaatggaatggtgaaatgaaatgtcagctaagattgtgcaactgcattccagtctgggtgacaaagtgagatccagtcgaagtaaaggaatggaatggaatagagtaaaatggaatggaatggtgtggagtggaatggaatggagaggaatggagtggagtggagtggagtggagtggaatggagtggagtggaat

SEQ ID NO: 4058 - DNA, 178 bp, Protomyxzoa rheumatica
ataaagacataccccagactgggaagaaaaagaggcttaattggatttaagttccacatggcaggggaggcctcagaatcgtggtgggatgtgaaagatacttcttacatggcagtggccagagaaaaatgaggacgatgcaaaagtggaaccccctgataaaactgtcagatctcat

SEQ ID NO: 4059 - DNA, 290 bp, Protomyxzoa rheumatica
agtggacatttggagggctttgaggcctctggtggaaaagcaaatatcttcacatgaaaactggagagaagaattctgtgaaacttttttctgatgcgtgtgttcatctcacacagatgaaccttccttttgattgagcagtttggagacactctttctgtagaatctgcaagtggacatttggagccctttgtggccaatggtagaaaaggaagtatcttcatataaatctctgccgaaacaaccagataaacttctttgtgatgtgtgcattcatctcacagagttga

SEQ ID NO: 4060 - DNA, 240 bp, Protomyxzoa rheumatica
ttcatacaaaagtagacagaagaattctcataaacttctttgtgatgtgtgcttcaactcgcagagttgaagcttcctttcgatagagcagttttgtaaccctctttttgtagaatttccaagtggatatttagcgccatttgacgcctaagttagaaaaagcaatgtcctcattgaaaaactagacagaatgtttctcagaaactactttgtggtgtgtgcgttcaacacagagagttt

SEQ ID NO: 4061 - DNA, 128 bp, Protomyxzoa rheumatica
tctgtaagttgaatgcatacatcacaaagaagtttctgagaatgtttctgtccagttttcatttgaagttattcccgttttcacagaaggcctcagatctggcaaaatatccctttgcagatcttaca

SEQ ID NO: 4062 - DNA, 167 bp, Protomyxzoa rheumatica
agaagcattctgagaaacttctttgtgatgtgtacattcaactcacagaggtgaacctgtctattgattgctcagttttgactctaccttttggtacagtctgtaactggatatttggagacttttgcatcctatggagggaaaggaaatatcttcaaataaaaact

SEQ ID NO: 4063 - DNA, 163 bp, Protomyxzoa rheumatica
cctacaaattccacaaaaagtgtgcttcatatcagctctttctaaactaatgttcatctctgtgagttgagtacatgcaacacaaaaagttgctgagaattcttctgtctagctttatatgaagaaatcccatttccaacaaaggcctcagagcggtcaaaat

SEQ ID NO: 4064 - DNA, 167 bp, Protomyxzoa rheumatica
tggaggaaaaggaaatatcttcacataaaaactagacagacgcattctgacaaatttccttgtgatgtgtgcattcgtcgcacagagttgaatctttcttctgtttgagcagttttgaaacaccctttttgtagaatctgcaagtgtacatttggagcattttgatg

SEQ ID NO: 4065 - DNA, 188 bp, Protomyxzoa rheumatica
gaggcctatggtgaaaaagtaaatatcttcacctaaaacccagatagaagcattttcagaaaactctttggatgtttgcattcatctcactgagttgaacctttctgtttattgagcagtgtggaagcatactttttgtgcaatctgcaaaggaatatttgtttacggtttgagacctatggtgaaaa

SEQ ID NO: 4066 - DNA, 122 bp, Protomyxzoa rheumatica
tactgccttgtgatgtgtgcattcttctcacagcggtaaaccttcctattgattcagtagcttcaaaacactccttttcaagaatctgggaagcaacatttgggagcacattgtgggctatg

SEQ ID NO: 4067 - DNA, 145 bp, Protomyxzoa rheumatica
atgtgtgcattcaactcacagagtttaaccttccttttgagagagcagttttgaaacagagtttttgcagtgtctgcaagtggatatttggagtgatttgcggcctatggttgaaaattaaatatcttcacataaaaactacaca

SEQ ID NO: 4068 - DNA, 140 bp, Protomyxzoa rheumatica
gtatctctgcactgataacctaggacatgtaacgcttgtctaggctctgcctacagtgccattgggacttatctcagcaatgatcatccaagtgatgtatctcttgtctaggatctgcctaaagggactttgtgacataa

SEQ ID NO: 4069 - DNA, 133 bp, Protomyxzoa rheumatica
tgaaaactagacagtagcattctcagattcttctttgtgatgtgtgcattcaaataacagagttgaacctttcgtttgatagcacagttttgaaactctccttttgtagaatctgccttcggatatttgtaga

SEQ ID NO: 4070 - DNA, 149 bp, Protomyxzoa rheumatica
aactactttgtgatgtgtgcattcatctcacagagttaaaattgtctttttattgagcaattttgaaactctctttttgaagaatcagcaagtagacgtttggagtgccttgaggcctatgatggaaaaggaaatatcttcacataaaa

SEQ ID NO: 4071 - DNA, 122 bp, Protomyxzoa rheumatica
gtccacttgcagaatctacaaaaagagtgtttataaactgctaaatcaaaagaaagattcaactgtgtgggatgaacgccagcatcacaaagaagtttctcagaaatcttctgtctagtttt

SEQ ID NO: 4072 - DNA, 153 bp, Protomyxzoa rheumatica
tggctaagcatgtaaataggagtgcagtaccctcatgacctatcttttgcctaggtagctggcctataatattgcattattctttcagggggccaatctgtgtctttctaatttcttttttctatatccctttttatgtctgcatctcttttg

SEQ ID NO: 4073 - DNA, 176 bp, Protomyxzoa rheumatica
tatgatatggctaagcatgtaaataggagtgcggtaccctcatgacctatcttgtgcctaggtagctggcctatagtattgaattattcttttaggggggtaatctgtgtctttctaatttcctatttctgtatctctttttatgtctgcatctcttttgcttcttcttctaactt

SEQ ID NO: 4074 - DNA, 514 bp, Protomyxzoa rheumatica
aactgctttgtgatgtgtgcattcaactcacagagttgaaccttccattggagagagcagtgttgaaacggtatttttgtagtatctgcaagtggatatttggagcgatttgaggtctaagaaggaaaaggaagtaccttcaaataaaaactagacagaagctttctcagaaactgctttgtgatgtgtgcatttaactcaaagtcttgatccttacttttgttagagcagtgttgaaacacactttttgtagaacctggtagtgttcatttggagagatttgttgcctatggtggaaaaaggattatcttctcttaaaaactagacagaagcattcttagaaactgctttgtgatgtgtgtgttcaattcacagagttgaaactttcctttgacagagcaggtttgaaacactgcttctgtagaatctgcttgtggatattgggagctccttgaggaatacgttgtaaaaggcatatcttcacatacaaactagacagaagcattctcagaaa

SEQ ID NO: 4075 - DNA, 198 bp, Protomyxzoa rheumatica
gaccagtttggaaacactgtttttgcaaatctgcaaagcaataatagataccgcaaaatagcccttgatcaacacggaaatatcttcagaaaaaaactggaaagaagcgttatgagaaactgctttctgaagtgtgcattcatatcacagagttaagtccttcttttgatggaacagtttctaaacacttattttgta

SEQ ID NO: 4076 - DNA, 132 bp, Protomyxzoa rheumatica
gcacagatcacaaagcagtttctcaaaatacttcttcctagttttcaaccgaagatagttcctttttcaccataggcttcaatgtgctcccaaatgcccctccacagattctacaaaaacagtgtttccaaa

SEQ ID NO: 4077 - DNA, 346 bp, Protomyxzoa rheumatica
tgtccctcacataggattccacaaaactgctacaagattctgaatggttttcctcactgaggattccagaacactgctcctggggtataaatatttggccgtcacataggattccagaacactactacgagggtctgtatgtttgttcctcacaggggattccagaacactaatgctgtggtctgaatgttcgttcctaacacaggattctggtacactgctatgagggtcagaatgtttgtccctcacattggattccagaacaatgctaccaatgtctgaatgtttgtccctcacatagaattccagatcactgctacgagggtctgaatgtttgtccctcaca

SEQ ID NO: 4078 - DNA, 298 bp, Protomyxzoa rheumatica
gaaacttctttgtgatgtttgcattcatctcacagggttgaaattttcttttgattgagaagttttgagacactctttttgtagaatctgcctgtggataataggagcgctttggggcatattttggaaaaggaaataccttcacataaatagtagacagaagcattctgagaaacttctttgtgacgtgtgcatatatatcacagagttgaacctttcttttcatttagccttttgaaacactctttttctagaatctgcaagtgaatatttggagcgctttgcggcctatggtgga

SEQ ID NO: 4079 - DNA, 153 bp, Protomyxzoa rheumatica
tctttgtgatgtgtgctttccactcagagttgaaccttcatttagatagagaagttttgaaactcacttttaatagaatttccaaatggatatttagcgccacttgaggtctaaggtagaaaaggaaataccttcatagaaagacttgacaga

SEQ ID NO: 4080 - DNA, 449 bp, Protomyxzoa rheumatica
gaatgtttgtccctcacacaggattccagaacactgctgcaggggtttacatgtatgtccatcacataggattccatgacactgccactgggttctgagtgttactccctcatgtagaaataaagaacatggtgacgagggtctgaatgtttgtccctaaacaggattccagaacactgctaagagggtattaatgtttgtccctcacataagattccaaaacactgctacaaaagtctgaatctttgtccctcacatgggactccagaacactcctactggggtctcaatgtttgtccctcacataggattcctgaacactgctacaagggtctgaacgtttgtccttcacaaaggattccagaacactcctgtggtctgaatatttgtccctcacataggatttcaaaacactcctgctgtgttctgaatgtttgtccatcacatag

SEQ ID NO: 4081 - DNA, 219 bp, Protomyxzoa rheumatica
gaaaacagcattcgtgttttgcaatcctatgggagggacaacatttagacccttgtagcagagttctgaaatccagtgtgagggacaaacattcagaccactgcaggatggtttgggaatcctatctgagggacaaacattcagacccaagaagaagtgttctgcaatcctatgtgagagacaaacattctaacaacagctggagtgttctggaatcct

SEQ ID NO: 4082 - DNA, 229 bp, Protomyxzoa rheumatica
tataaagtgtaataatagacactggagactacagatgattggaggttcagagcagggtgagagttaaaaatttaactcttgggtgccatgtttactgttgggtgatgggtacagtgaaagcccagactccaccactatgcaatatacgcatgtaagaaatctgcacttgtaccctctaaatctataaaaagataaaagaaaatgacaaagtcaattttaagaagaacca

SEQ ID NO: 4083 - DNA, 125 bp, Protomyxzoa rheumatica
gaagtggagccacccgggagatgctgggcaagtacgttgcagacagaacatgcctcagagatctttagaccaagtgaccaagtagaacactgaagccctgtgcattggaaagaaaactatgactc

SEQ ID NO: 4084 - DNA, 142 bp, Protomyxzoa rheumatica
tagttgaaacaatctctgtgacagtttagagtttaaaatatttccatatttgttatttcattttatctttttttgttttgttttatttttttgaaacaatcttgctctttgcccaggctggagtgcagtgatgtgatctcgg

SEQ ID NO: 4085 - DNA, 156 bp, Protomyxzoa rheumatica
ttttgtagaatctgtaagtggaaacttggagagctttgaggtctatggtgaaaaagaaatatcttccctgaaaaaggagagagaagaattcacagaaactgctttgtgatgtgtgtactccactcacataattgaacttttcctttgatagagcag

SEQ ID NO: 4086 - DNA, 181 bp, Protomyxzoa rheumatica
gaacctttcttttgatagagcagttttcaaactatattttgtaggatctggaagtggaaatttggagttatttgaagtgcattttggaaaaggaaatatcttcatataaaaacttgacagaagcattgtcagaatctactttgtgatatttgcattcaactcacagagttgaacgttcctc

SEQ ID NO: 4087 - DNA, 242 bp, Protomyxzoa rheumatica
gaacgtacatcaaatatatagtatatgctgcacataaaatatcaaagtacacaaagtatgtattatacactgtacataaaatatcaaagtaccaaaagtatatattgcatactgtaaataaaatatgaaggtaactgaaatatatattatattctgtacataaaatataaaagtacaccaagtataaactacatactctgcataaaatattaaattacccaaaatatgtattgtattgtgta

SEQ ID NO: 4088 - DNA, 167 bp, Protomyxzoa rheumatica
tggaagggaatggaagggaatggactcgaatggaatggaatctaattgaatggaaccaaatggaatcaaatcgaatggaatggaattgaataaaatacaaaggaatagaatgcaatggtgtgtaatggaaaggttttgaatggaatggaatggaatggactcgaatg

SEQ ID NO: 4089 - DNA, 124 bp, Protomyxzoa rheumatica
atagaaggcagaagacagaaacgtgtagccaaacatattattttaatgattacttatattcatttatactaatttatattgatgtaacatattaattttgactaaatgacattaaagaaggttt

SEQ ID NO: 4090 - DNA, 450 bp, Protomyxzoa rheumatica
atcgtgaaatgaaatgatagctgagattatggtgcttaactccatcctgggtgatggagtgagatcatgtcgacagaaaggaatagaacggattggagtggaatggaatggagtagaatgcagtggagtggagtggagtggaatggactggaatggaatggattagaatgcagtggagtggagtagagtggaatggactggaataaaatgagatgggaaggagtggaatggaatggggtggagcagagtggagtgaagtggaatgcaatggagtggaatggaaagggatggaatggaatagagtggagaggagtggagtagagtgcaatggaatggaatggagtggagtggagtggggtggagtggagaggagtggactggaatggaatggaatggaatggagtggaatagagtggaatagaatggtgaaatgaaatctgagctgagatt

SEQ ID NO: 4091 - DNA, 385 bp, Protomyxzoa rheumatica
aagagctctacagtgagaattacaaaacactgctcaaataaatcagagaagacacaaacaaatggaaaaccacctcatgctcatggataggaagatccaatataactaaaatggctatacttcacaaagcaattgacagatttaatgctatttccatcaaactgccaataaaattttttacagagctagaaaaaactattttaaaattcctataggctgggtgcagtggctcacgcctgtaatcccagcactctgggaggccgagggctgcagatcatgaggtcaggagatcgagaccatcctggccaacatggtgaaactccttctcaactaattttttaatagctgggtgtagtggcaagcgcttgtaatcccagctactcgg

SEQ ID NO: 4092 - DNA, 144 bp, Protomyxzoa rheumatica
ttttccacaaaaagcctcaaaaagctccaaatatccacttgcagattctacaaagagagtgtttcaaaacggctaaatcataagatacactcaattctgtgagatgaatgcacacatcccaaagaagtttctcagaatgcttct

SEQ ID NO: 4093 - DNA, 259 bp, Protomyxzoa rheumatica
tccactcactgcactccattccattccactccatcccattgcattccactccattccactccacaccactccactccacttagcttcactacactccattccattccatttctttcttttgacagcatctcaccctgtcaaccagactggcagacagtggcacaaactcagttcacatttcatttcaccactccattacattctattcctttgcattcaattccattgcattccactgcattccattccattccactcc

SEQ ID NO: 4094 - DNA, 373 bp, Protomyxzoa rheumatica
atggaatggaatggaatggattcgaaaggaatggaatggacttgaaaggaaagaaatcaaatggattgggctcgaatggaatagtatggaatttaccgtattgcaatccaatggaatggactctaatggaatggaatggactccagtagaatggaagggaaatatatgcactcaaatggaatagaatggaatggacttgaatggaaaggaatggaatggaatggactccaatggaacagaatggaatggacccgaatggaatgaaatggaatgaaatgtacaagaattgaatgaaatggaatggattagtctcaaatggaattgaatggaatggaatggattccaatggaatggaatggaatggaattcactc

SEQ ID NO: 4095 - DNA, 161 bp, Protomyxzoa rheumatica
tttatgtgaagatatttccttttccacagtaggcctcaaagcgctccaaatttccacttacagattctacaaacagagagtttcaagactgctcaatcaaaggaaaggtttaactctgtcagattgatgcacacctcaaatagaagtttctcagattgctt

SEQ ID NO: 4096 - DNA, 361 bp, Protomyxzoa rheumatica
taaacttagatccactccatttggaaaacattgtttatcaccttatgcaataataacaggaagacctatgaggctggacaagggcttacatgagccagttttacccaagggaaaaaatactgcattatagccaaggatttcttaaaacttaaaaaaacacaaagttggtaacagaacctttccactatgagctcctgggagccaaggactccaaggatctcagatcacacccagttgactttgtgtactggaaagacaacaactgaaaggcttcctatagcctcgctggaaaggaccttaccaggtgtttgcaacttactcttgtgctgaaaaactaacgggagttgcttcttggatttac

SEQ ID NO: 4097 - DNA, 295 bp, Protomyxzoa rheumatica
gagattctatagatctcaaataacctctcaggggtcttggttaaaacattcggggttttcaacaaaatattctatagcaaggaaagcaagcatgagagttactgcagggttcatgaggacaggcatgaattctctggaaaaatgtctgctttggttgttgctctggagaacggctgaacctcagctgttttctaaaatcacaagtgggtgtcagaggccggttcagaagtccaggtgtagtcagaaatatgattggatgcccatgataggtgtgagatgtaaatccaagaagcaa

SEQ ID NO: 4098 - DNA, 124 bp, Protomyxzoa rheumatica
ccattaatcctcccagattttcagctcccttttctgaccattggtccttagtctccgcaggttcttccaccaacagatcctccccacaatataaaatgtgcatacttcagggctctatccttta

SEQ ID NO: 4099 - DNA, 759 bp, Protomyxzoa rheumatica
tctgtctcaaaaaaaaaaaagaaaaagaaaatattcactgtttgcaaaaggaagcagaaaacaggaactggagaattaaaagtacatataaggaatacaaaacaaaaattaaatgtctgatatgatccaactatatcaataataatattaaatatgacttgattaaacaacgtaatcaaaagttaattcttgtcagacaataaaaaataagatcctctatgccatctactagagtaacattttagattcaaagatataaatagagtaaaaagatgtaaatacatatattatgcaaacagaaaccctgataaagctattctaaagtagccatactaatatcagacacaatgaattaaaaaaaaaaaaaactgaccaggtgcaatggctcatgcctgtaatcccaggactttgggaggccaaagtgtgtggatcacttgagatcagaagtttgagactagcctggccaacatggcaaaaccctatctctactaaaaatacaaaagttagctatacatgttggtgcatgactgtaatcccagctactctggtggctgagactggagaattgcttgaacatgggaagcagagcttgcagtgagcacagctcacaccactgcccttcagcctgagtgactcactaaaactccatctccaaaggaaaaaaaaaaagttgtcagtattacccatgatgatataaaaatgtaatgtaattttcatctaaatcccaatggtattttttttgcagaatttttgtgtata

SEQ ID NO: 4100 - DNA, 307 bp, Protomyxzoa rheumatica
gatatatctttttccaccataggcccaaaagcactccaaatattcacttgcagattctacaaaaagagtttttcaaaactgctcaatcaatagaatgttcaaccctgtgagattaatgcacacatcaaaaagaagtttctcaaaatgcctctgtgaagttttcatgtgaggatatttgcttttccacagtcggcctcaaatcactccaaatatccactttcagatactacaaaaaccgtgtttcaaatctgctccatcaaaagaaaagttcaactctgtgagatgaatgcacacatcacaaagaagt

SEQ ID NO: 4101 - DNA, 246 bp, Protomyxzoa rheumatica
agtttctgagaatgcttttgtctagtttttatatgcagatatttccttttctaacaaaggcctcaaagcactccaagtatgcacttgcagattctacaaatagtctttcaaaagtgttccaagaaaaggaatgttcaactctgtgagttcaatgcacacatcacaaagtagtttctgaaaatgcttctgtccaatttttatttgggaatattcccgtttccaacgaaatcctcaaagctatccaaa

SEQ ID NO: 4102 - DNA, 158 bp, Protomyxzoa rheumatica
gacatttggagtgctttgaggcctatggtggataatgaaatatcttcatataataaatagagagaagcattatgataaactttttgtgatgtctgcatacatctcacaaagtgttgaaactttcttttgattgagcagctttgcaacattctttttgt

SEQ ID NO: 4103 - DNA, 195 bp, Protomyxzoa rheumatica
gtacggaatgcagtggaatgcaatagtatggaatggattggaatggaatggaatgcagtagaatgcagtggagtggaatggagaacagtggaaggggtggagtggaatggagtggaatggagtggcgttgaatttaatacaatggagagcaatggaatgaattagagtggaatgaaatggagtgcagtggaatgg

SEQ ID NO: 4104 - DNA, 325 bp, Protomyxzoa rheumatica
atcacataggactccagaacactcctgctgtgctgtgaaattttgtccctcacatagcattcaagaacactgctacgagggtctgaatgtatgtacctcacatgggattccaggacactcctgctgtggtctgaatgtttgtacctcgcataggattccagaacactcttgctgtggtctgaatgtttgttcatcacataggatttcagaacactcctacgagggtctgcatgtttgtccctcaaattgaattccagaacactcatgcagtggtctgaatatttctccctcacacaggattccagaacactcctgctgtggtctg

SEQ ID NO: 4105 - DNA, 183 bp, Protomyxzoa rheumatica
cagtgttctggaatcctatgtgagggacaaacattcagacgccagcagcagtgttttggagtcgtatgtgatggacaaacattcagacccttgtagcttcttctggaatcctatgtgagacacaaacacccagaacccagcaacagtgttctggaatcctatgtgaggaacaaacattcaaac

SEQ ID NO: 4106 - DNA, 137 bp, Protomyxzoa rheumatica
cattgcattccattccatttgattacattccattatattccattccattcatttcaattacatagcaatccgttacattggagtccgttctattccagtccattccattgtggtcctttccattcaattccattcca

SEQ ID NO: 4107 - DNA, 159 bp, Protomyxzoa rheumatica
ttgaatggaaacgtcacaaattagtttctgaaaatagttctttcttgtatttatgtgaagatatttccttttttaccataggtcttatagcgctctaaatatacaattgccatttccacaaaaagagggtttcaaagctgctttatcaacagaaacttt

SEQ ID NO: 4108 - DNA, 158 bp, Protomyxzoa rheumatica
caaagtacccaaagtatgtattacatactgtatttaaaataacaaagtatccaaggaatgtattatgtactgtacataaaatgtcaaagtaccctaagtatgtattatctattgtacataaaacatcaaagtacccaaagtatgcattatatactgta

SEQ ID NO: 4109 - DNA, 217 bp, Protomyxzoa rheumatica
cagtatggaaacactctttttgtataatttgtaagtggatatttggagcgcgctgtggccaatggcagaaaattaaatatcttcacataaaatctagacagaagtaatctcaaaatcttctttgtgatgtgtgcattcacctcaaagaggtaaacctttcttttgattgaggagtttgaaaatctttttgtagaatctgcaagtgaatatttggaaa

SEQ ID NO: 4110 - DNA, 159 bp, Protomyxzoa rheumatica
agttttgaaacactgtttttgtagaatctgcaagtggatatttagagggaattgaggcctaccgtggaaaagcatatacctacaaacaaaaactaaacagaagcattctgagaaacttcttagtgatgtgtgcattcgtctcacagagttgaaactttc

SEQ ID NO: 4111 - DNA, 161 bp, Protomyxzoa rheumatica
tggaatcatcatcgcatggaaccaaatggaatcatctaatcgacatgaatggagttatctttcagtggaatcgaatggaatcatcgaatgcactcaaatggaatcatcatggaattgaattgaaatgaatcattgaatggacttgaatggaatcattgaat

SEQ ID NO: 4112 - DNA, 160 bp, Protomyxzoa rheumatica
aagggagtggaatagaatcgtatgtaatggaatgtagtggcgtgaagtggagtggaacggaatggaatggaacagagtgcaacgaaacggaatggaagttgttctgagatggtgccactgcactgcaacctgtgtgacagagggagatcctttcgaaaga

SEQ ID NO: 4113 - DNA, 130 bp, Protomyxzoa rheumatica
agatattttctttttcaacacaggcctcaaattgctcagcaatatccctttgtagattctgcaaaaagactgcttcccaactgctcaatcaaataaatggttgaactctgtgagatggattgagatggat

SEQ ID NO: 4114 - DNA, 379 bp, Protomyxzoa rheumatica
aaaaggaaatatcttcacataaaatctagacagaagcaatctgagaaacttccttgtgatgtgttcatttatctcacataattaaacctttctttggattgagcagttttgaaactctctttttgcagaatctgtaattggacatttggagcactttgaagtctatggtgaaaaaggaaatatcttcacatgaaaaccagatagaagcattctgagaaacttttttgtgatgtgtgcattcatatctcagagttgaaggtttcttttgaatgaccagttttgaaatcctctttttgaagtatctgcaagttgacatttcgagcaccttgaggcgtatggtggaaaaggaaatatcttcacataaaatctagacagaagc

SEQ ID NO: 4115 - DNA, 178 bp, Protomyxzoa rheumatica
tggaatcgaatggagtggaatcaaatgaattgcactggaaagcaatggactcgaatggaatggactggaacaaaatggaatcgaacggaatggaatagaacagaaagaattggaatgaaatggatagcaatggactcgaatgaaatggagtcgaatgtaatggaattgaattgaatgg

SEQ ID NO: 4116 - DNA, 307 bp, Protomyxzoa rheumatica
cccactttttctctatactttgtctctgagactcttttcacaagtctcttgttccacctgatgagaaacgcccacaggtgtggagggacaggccactccttcaatatactgtccctattatcatctgtcacttcccagagagggcaaacattcagctttgctagctgataagaggccccactgcatgttgttctggtgaagctcggggttttcgagagtggggtatgtacgtaagacaggactcgaagggcatggagaagatgatgaccggacactagataaccttggaaaactagaggaaattaat

SEQ ID NO: 4117 - DNA, 158 bp, Protomyxzoa rheumatica
tcgatgatgattccattcgagtccattcgatgattccatttgatttcattcgatgatgactgcattcggttccattcgatgatgaacccaacggactccattcgatgaccccattaggttccattcattgatgattccattcgattccattcgatgat

SEQ ID NO: 4118 - DNA, 570 bp, Protomyxzoa rheumatica
ttttttgaatagggacacctttccctaattccttgtttttgttaactttgtcaaagatcaggttgttgtaggtttttggctttatttctaggttctctactttgtttcatttgtctatgtgtctgtttctataccagtaccatgctgtttttgttactgtactcttctagtatagtttgaagttaggtagagtgacgcttccagctttttttttttttcttaaggttggcttggctatttgggctcttttttggttccatatgaactttaaaagtttttatttttctaattctctgaagaatgtcagtagttcaatgggaatagcattgaatctatgaattacttagggccatatgcccatattcatgatactgattcttcctctccatgagcatggaatatttctccatctgttttgtgtccactctgatttctctgagcagttgtttgtggttctccttgaagaggtccttcactttctttcttagctgtattcctaggtatttttttctctttgtagcaaatgtgaatgaaagttcattcatgatttgtctccctgcttgcctgttg

SEQ ID NO: 4119 - DNA, 317 bp, Protomyxzoa rheumatica
gagtagaatggagtggagtggaatggaatgcaacggaatgaagttgagtggaatggaatggagtggtgtggagtagacttgagtgaaacggaaaggaatggagtagaatgcaatggaatggaaaggaataggtgttgagattgtgccattgctctacagcctgtgtgacagagggagaacctgtcgagcgaaaggagtggaatgggatggagtggagtgaagtggagtgtagtggagtggaatggagaggaacagagtggtgtggaggggaatgaagtggagtggagtggagtggagtggaatggagtgcagtggag

SEQ ID NO: 4120 - DNA, 123 bp, Protomyxzoa rheumatica
tgtcacaatgtcccctgtaggcagagcatagagaagagtttcatcacctcagtgatcagtgcagagatatgtcacgatgtcccctttaggcaaagcctaggcaacagttacatcgcctttgtc

SEQ ID NO: 4121 - DNA, 209 bp, Protomyxzoa rheumatica
tgaacctttcttttgatagagcagttttgaaactctctttttgttgaatctgcaactggttatttggagctctttgtggccggtggtggacaatgaaatatctttccataaaaacgaccaagaatcattagaagtaacttctttgtgatgtgtgtgttcatcttacagtgttgaaccttgcaattcattgagcagttgtgaaacactct

SEQ ID NO: 4122 - DNA, 221 bp, Protomyxzoa rheumatica
gaatccattccattcaattccattcactttgattccattcctttggagaccgttccattctagtaaattcccttcaagtccattcaattccactttatttgattcaattgcattcgattccattcctttcaattgcattccattcgagtcctttccattgcagaccattccatttgcgtccattccattccacaccgctcgagtccattccattccattcc

SEQ ID NO: 4123 - DNA, 161 bp, Protomyxzoa rheumatica
agtggcgtggagtgaaatggaatggaatggaatggaatggtgaaatgaaatatgagctgagattgtgcactgcaatgcagcctgcatgaaagagtgagatcctgtcgaaagaaacgaatggatggaatggatttagaatggaatgtaatggaatggagtgg

SEQ ID NO: 4124 - DNA, 280 bp, Protomyxzoa rheumatica
caaaaagaatgttccaaaactgatcaatcaaaagaaaggcgcaactctgtgagacgaaagcacacatcacaaagaagtttctcggaaagcctctgtctgcattttatgtgaaggtatttcctttggcaccataggccttaaaccgctcgcaaatataactccacttatactacctagagactttctccagattgctaaatcaaaagaaaggttcaactctgtgagatgaatacacacatcaaaaagaagtttctcaaaatgcttctgtctagttttcatg

SEQ ID NO: 4125 - DNA, 259 bp, Protomyxzoa rheumatica
acacagacacccaattactaagatgaggggctttgcactaaatatttgttcactaagttaaagtccactgtttgcatccaattatttttgttattgttttgcaaacctaaaagtctgtatcaatatctcatggctagatttctgaagcaaaagctacaggatctttgtttgtacgagtgtgtatgtgtgtatttatgtgtatgtgcacgtattttgttatgtgtttctgatcacaaggcaacaaatttggcttaaactt

SEQ ID NO: 4126 - DNA, 193 bp, Protomyxzoa rheumatica
gatacatggttattttaccaataattcaagattcagcaattttcattaaacccacaatattaacatcttattggtttaaaagctacacaagcagagataattctgtttggtggctgggtttatagttttataattttgttttttgagatggagtctcactcagccacccaagctggagtgcagtggcaacact

SEQ ID NO: 4127 - DNA, 92 bp, Protomyxzoa rheumatica
gcagagggaaatttcttagctgcttgaggcctatggtgaacaagaaatagcctcacataaaaagtagacagaagctttctgagaaacttctt

SEQ ID NO: 4128 - DNA, 239 bp, Protomyxzoa rheumatica
atatcttcccataacaactagacagaagcattctcagaaacttatttcagatgtgtgtactcaactaagagaattgaaccaccgttttgaaggagcaggtttgaaacactctttttgtagtatctggaagtggacatttacagccattggaggcctatggtgaaaaaggaaatatcttcccataaaaaccagacagactcattctcagaagcttttttgtgatgtgtgtaatcaactaa

SEQ ID NO: 4129 - DNA, 129 bp, Protomyxzoa rheumatica
gggagtactgtgtgaggggctctcggtggtcgtgattgaagaagtgaagctggaaggactgtatgagatggtcttcttggtggtgattgaagaagtcaagctggacgtactgtgtgaggtggtctcagt

SEQ ID NO: 4130 - DNA, 193 bp, Protomyxzoa rheumatica
cattccattccattccattagattccattccattccattccattccactgccttccattccattattttattttgagagtatctcactctgtcacccagcctggagtgcagtggcacaatctcagctcacatttcatttcactattccattgattcttttctattccattccattccattccattccattcca

SEQ ID NO: 4131 - DNA, 186 bp, Protomyxzoa rheumatica
tcaatgcacacatcacaaagaactttctctgaatgcttctgtgtagtgtttgtttatgtgaagatatctgcttttccactatagggtgaaatagggctccaaatatccacgtgcagattttgcaaaaaggagattcaaagcatctcaatcaaaagataacttcaactatgtgagttgaatgcacac

SEQ ID NO: 4132 - DNA, 132 bp, Protomyxzoa rheumatica
attcagaccccggtagcattgttctggaatcctatgtgaggaaaatacattgagaacacatcaggagtgttctggagtcctatgtgcgggacaaacattcagaccctcttagcggtattctggaatcctatg

SEQ ID NO: 4133 - DNA, 155 bp, Protomyxzoa rheumatica
tgcactgatcacccaggtgatggaactgttgtatgagctctgcctacagtggaattctgagagatctctccaccgatcacccaagtgttgtaactattgtctaggctttgcctacatgggacattgtgacatatctctgcactgatcacccaggt

SEQ ID NO: 4134 - DNA, 111 bp, Protomyxzoa rheumatica
ggaaacgggatttcttcacataatgctagacagaagaattctcagtaacttcttatgggttgtgtgtatttaactcagagagttgaaccttcctttagacagagcagattg

SEQ ID NO: 4135 - DNA, 193 bp, Protomyxzoa rheumatica
tcctatgtgaggggcaaatattcagaacctcatagcagttttctggaatcctaggagagggacaaacactcacaacccaacaggagtgttctgggaacctgtgtgagggaaaagcattcagacaacagcaggagtgttctggaatcatatgtgagggagaaacactcatatcacaacaggagtgttctagaat

SEQ ID NO: 4136 - DNA, 359 bp, Protomyxzoa rheumatica
cataggattacagaacactgctgctgggttctgagtggttagccctcacaaaggattccagaacactgctaagagggactgaatgtttgtccctcaaatagcattccagaacactcctgatgtggtctaaatatccgttcctcacataggattccagaagaattctgctctagtctgaatctttgtccctcactagtattccagaacactgcttcaaaggtctgaatgtttgtccctcacaggggattctagtacactcctgttgtggtctgactgtttgtcccccacataggattccagaacactgctaggaggaactaaatgcttacacctcacataggtttccggaacactcttac

SEQ ID NO: 4137 - DNA, 346 bp, Protomyxzoa rheumatica
ccattcgattccattccattccagtccattcctttttattcctttcctttcgattccattccattcaattgctttcaattcgattctcttccaattgattccattcctttggagtcaatatttttcgagtccgctgcattcaaatccattccatacgagtccatttcattccagtcaattacatttgagtccattccattccagtccataccatttgattccattcccttccattcaattcaatatctttccattccattccattcaaattcattccattagattctattccattagattcgagtccattccatttgagtgtattccactcgagtacattccattc

SEQ ID NO: 4138 - DNA, 152 bp, Protomyxzoa rheumatica
tcaaaaggaatcatcatcgaaaggaatcgaatggaatcatcattgaatggaattgaaaggaatcagtgaatggaatcgaatggaatcatcatcaaaagtaattgaagtgaatcatcgaatggaatcaatttgaatcatcaaatagaattgaa

SEQ ID NO: 4139 - DNA, 402 bp, Protomyxzoa rheumatica
ttctggaatcctatgtgagagacaaacattcagaccccaggggtagtgttctggaatcctatgtgagggacaaactttcagaccacagcgggagtgttctggaatcctatctgagagacaaacattcacaccctcgtagcagtgttcttgaatcttatgtgagggacaaacattcaaactctcctagcagtgttctggaatccgatgtgagggacaaacactgcaaacccagcagcagtgttctggaatcctaagtgagggacaaacattcagaccctagcagcagcattctggaatcctattgagggacaaaaattctgaccctcatctcagtggtctggaattctaggtgaggaagaaactcagacaatcgtagcagtgttctggaatcctatgtgaggg

SEQ ID NO: 4140 - DNA, 226 bp, Protomyxzoa rheumatica
tataggattccagaacactactattgtagtctcaatggttgaccctcacatgggattccagaaaactgctgctgtagtctcagtggttttgcctcacatgggattccagagcaatcctcttgtggtctgagtgtttctcactcacaaaggattccaaaacactcctgccatggtctgagtgtttgtccctcaagtaagattccacaacactgctactgggctctga

SEQ ID NO: 4141 - DNA, 128 bp, Protomyxzoa rheumatica
catttgcagaataaacgaaaatagtgtttctaaactgctgaatcaaaagaaaggtttaacactgcaagatgaaggcacacatcacaaaacagttccttagatagcttccttctagtttttaacttggg

SEQ ID NO: 4142 - DNA, 330 bp, Protomyxzoa rheumatica
ggaggtgaatggaatggaatggaacacagtggtgaaaggaaatgagagctaagattgtgtcactgcactacagtctgggagacagagttacagccaattgaaataaaggaatggaatggaatggagtagagtggaattgaatggagtggagtggaatggaacagaaaggaaaggagtggaatggagtggagtggacagtaacagaaaggagtggaatggagtggagaggaatggagtggaagtgaatgaaatggaatggagtagaaggcaatggaaattaatggaatgacttggaatggagtataatggagtggagtggggtggaatgga

SEQ ID NO: 4143 - DNA, 194 bp, Protomyxzoa rheumatica
tattaaaaattccctgtagtcactggaatgataatttttggtgccgtttcagcataataatctttggagtttttagatattctaattattcaaattgcggccatgtttcaaaatatatgccatataattttatggcatccgcctctgtgtccctgttggctcaggaaacgtgcttcttcctccttccgcagact

SEQ ID NO: 4144 - DNA, 144 bp, Protomyxzoa rheumatica
gctgttttgaatctcctttttgcagaatctgcaagttgatacttggggccctgtttcaccctatagtggaaaagcaaatatctgcacataaacaaacactacagagaagcattcagagaaagttctttgtgatgtgtgcattga

SEQ ID NO: 4145 - DNA, 199 bp, Protomyxzoa rheumatica
ctgattcaaagaggtattcatgctttcagttggtctgtgttttactccatttgtattgttataaataaatacttgaggctgggtaatttataaagaaagaggtttatttggctcacagttctgcaggttatacaagcagcatggtgctggcatctgcttctaaggaagcctcaggaaacttacaatcatggcagaaggt

SEQ ID NO: 4146 - DNA, 234 bp, Protomyxzoa rheumatica
agttatttccttttccaccataggactcaatgcactcctgaatatccctttggagattctacgaatcagtgtttctgaactgttccatcaaaggaagcatttaactctgagagatgaacacacacctcagaaacaagttccttataacgctcctttctagcttttatctgaagctatgtccttttttgccataggcctttttgtgctacataacatcgcttcgcagggtataca

SEQ ID NO: 4147 - DNA, 125 bp, Protomyxzoa rheumatica
aagactccttttgtagaatctttgaagggacatttgggagcccattgaggccaatgggaaaaaaacagaatatccccacataaaaactagaaagaagctatctctgaagctgccttgtgacgtgt

SEQ ID NO: 4148 - DNA, 152 bp, Protomyxzoa rheumatica
atgtgctacagatagtaaactatctcaaatgcactgcagatagtaaactatagccaatacactatggatggtaagctatcccaaatgtgctgcagatagtaaactattccaaatgtgctacagatagtaaactatctcaaatgcactgcaga

SEQ ID NO: 4149 - DNA, 210 bp, Protomyxzoa rheumatica
cacaccaggccaaccctgcgaacacagtagaaaccaaccagcataaatcacagaaagaaagtacacattaaaaaaaagatcagtgagctgtaaaacaacttttagtagcataacttacatgttactggaatacccaaaggagaataaacagaacaaaagcttaaaaagccccagaaaattgaagaaataatagtagaaaaaatacaaaat

SEQ ID NO: 4150 - DNA, 242 bp, Protomyxzoa rheumatica
aaagtccataggtcacattagggttcactcttagtgttatacatgtatgaatttacacatacatacaatggtgaatggcatatattcaccattacagtattgatgtggtttggatctatgtccccacccaaatctcatgctgaattgtaatccctaatgctggaggtggagcctggtgggagatgattggatcacaggggccgtttctaatggtttagcatcatccccctagtgctgttctc

SEQ ID NO: 4151 - DNA, 201 bp, Protomyxzoa rheumatica
caaaaactccatgcccattaaacaataactcctccttcttccttcccctcagcttctgtattagtctgttcttgcactgctataaagaaatacctgagactgggtaatttacaaagagaagtttaattggctcataattcctgctgtacaggaagcacagcaacttctggagaggcctcagataactttcaatcttggcag

SEQ ID NO: 4152 - DNA, 214 bp, Protomyxzoa rheumatica
tgatcacccaggtgatgcaactcttctctatgctctgcctacagggcgcattgtgacatatctctgcactgatcacccaggtgatgtaacactttctagtctgtgccaacagaaggcgttgtgacatcactctgcacgggtcacctgggttatgtaacacttgtctaggctcggcctatggaggcattgttacttatctctgcactgatcaccc

SEQ ID NO: 4153 - DNA, 246 bp, Protomyxzoa rheumatica
gagaccattgaggcctatgatgaaaaaggaaacatattcagataaaaaccaaaaagaaatattctgagacactgctttgtgatttgtgcatacatgtcactgacttgtacctttctttggattcagtagttgggaaagagtgtttttgtccattctgcaaatggacatttgggagttcattttgggaaatggtgaaaaagcgaatatcccaggataaaaactagacagaagctatctgagaaattg

SEQ ID NO: 4154 - DNA, 345 bp, Protomyxzoa rheumatica
acttgaatcttacgtgagggacacacagtcagaacccaacagcaatgtctcttgaatcctacgtgaggtacaaacattcagatgacagcaggagtattctgaaatcataagtgaggaacaaacatttcgaccacagcaggagtgttcaggaatcctatgtgagagacaaacactcagacaacagcaggagtgttctggaatcctacgtgaggttcagtcattcatgccctcgtagcagtgttctgaaatcttatctgagggagaaacactcagaacccagtagcagtgctctggaatcgaatgtcagggacagtcattcagaccacagctggggtgtcctggaat

SEQ ID NO: 4155 - DNA, 160 bp, Protomyxzoa rheumatica
ctccagtccactacaatccattccattctattccgttccatttcattacaattcattccattccattttatttcgtcaggatctcactccgtcacccaggctggagtgcagtggcacaatctcagcccacatttcatttgagcttttcattccattccat

SEQ ID NO: 4156 - DNA, 190 bp, Protomyxzoa rheumatica
tggagatatttcctattccaccataggcctcatggctctcgaaaattctacttgcagattctacaaaaagcatatttcaaaactggtctttcaaaagagaggttcaaccctgtgagatgaattcacacatcagaaagaagtttctcagaatgcttctgtctagtttttaagttaagatatttccttttcg

SEQ ID NO: 4157 - DNA, 127 bp, Protomyxzoa rheumatica
tctgtgagacgaatgagcacatctcaaagaattttctcagaaaccttctatctagtttttatgcaaagatatttccgttttcacgatagacctgaaactgcctacatatatccctttgcagattcta

SEQ ID NO: 4158 - DNA, 176 bp, Protomyxzoa rheumatica
atggagatatttggaaacacccttttggcagaaactgcaaagagttatttgggagcgcatttcggtctacagtgaaaaatgacatatctccagataaaaaccagaaagagtctttctcagaaattgatgtgagcattcatctgacagagtgaaaactttcttttgattgagcactt

SEQ ID NO: 4159 - DNA, 127 bp, Protomyxzoa rheumatica
tctagtttttattggaatatatttcctttttcaccataggcctaactgtgctttcaaatatcccatagcagatactacaaaaatagtgtttccaaactgctcaatcaaaggaaatgtttaaatatgt

SEQ ID NO: 4160 - DNA, 123 bp, Protomyxzoa rheumatica
cagttaaacatttcttttggtagaagaggtttgaaacactctttttgtagaaggtggaagtggatattaggagcgctttgaggactatattggaaaaggaaatatcttcacaaaaaaccagac

SEQ ID NO: 4161 - DNA, 277 bp, Protomyxzoa rheumatica
gcatctcataaatttttaaattgtgtgataggaattacagggactctggcttctgttgtatttctttgaaaattattattttatgagggagttaatttgaatagatgcaaaccccaatccttatctcttctacagtggcaatactaaaatcttcattcagttcttctaaacagtgtgcgtttctatatagcaaaatatagtattttattaaactttattatagtatatgtgaaacagttattgaacaatctactctacttcattattactggaagcc

SEQ ID NO: 4162 - DNA, 130 bp, Protomyxzoa rheumatica
gataagaatcaaatggaatcacctaatggacaagaatggaataactatcaaatgtaatcaaatggagtcatcaaatacaatcgaatggaatcatcatagaatggaatagaatgtaatcataatcaaatgg

SEQ ID NO: 4163 - DNA, 175 bp, Protomyxzoa rheumatica
cttgaccttgtgatacacccaccttggcctctgaaagtgctgggattacaggcatgaggcaccgcaccctgtgagcgttctgtttttcattaatcttgcaagagtagagaaaatcctataaatcctctcatggaattccaggggtttaggccagtgttttagagggtgacaactg

SEQ ID NO: 4164 - DNA, 143 bp, Protomyxzoa rheumatica
ttttggtagaggtttttttataccatttggaaactggtttggataagctaccttaatgaaggaccacaagtctctccagagatgataaaagactttttgtcttttctggtaagtcctttctggaataaagatcagtgtgtttc

SEQ ID NO: 4165 - DNA, 127 bp, Protomyxzoa rheumatica
tactgagaattcttctgtcgaacattacatgaagaaacccgtttccaacgaacgcctcaaagaggtccaaatatcgacttgccgacatagcaaagacagtgtttgcaaactgctccatcaaaagaaa

SEQ ID NO: 4166 - DNA, 186 bp, Protomyxzoa rheumatica
gaaggcatttcaatctccaccatagccctcaaagtgctccaaatatacacttatagattctgcaaaaagactgtttccaaacttctgaataaaagacaggttcaacactgtgagatcaaagcacacaacagaaagaagattctctgaatgcttctctgtagatttaatgtgaagatatttcctttt

SEQ ID NO: 4167 - DNA, 360 bp, Protomyxzoa rheumatica
cattccattccattccattcctttcaactccagtacaatccattacaatccactacaatccagtacattcaactcctttccattctactccactcccctaccctccattccattccattccatttcacgcctctccacttcattccattccactccattccattcgattctattccatgtgattccactacattgcattccacctcactccactccattccaatccactcgactccactcttctccattccactccactccattccactgtgttccactccactgcattcgactccattccattccattcccttactttcaattaccaaccactggacgccactccactccactaaattc

SEQ ID NO: 4168 - DNA, 152 bp, Protomyxzoa rheumatica
tccactccacttcatcccacaccactccactccactccattctattctgtaacaatacatttcactccattttactccactccactccacgccattccactccccttcactaccttccgttacattccattctaaatccattccattccatt

SEQ ID NO: 4169 - DNA, 140 bp, Protomyxzoa rheumatica
tgtgatcagcacagagatatatcacaatgtcccctgaacaaaaagactggaaatgatttacatcaactcggtgatcagtgcatacgtatgtcagatatccccagtaggctgaagctagacaagggttgcatcatttaggt

SEQ ID NO: 4170 - DNA, 538 bp, Protomyxzoa rheumatica
atacataattagatatatacacacaattatataaatgtgtataattgtcataggtttccagtgaataaacccttttattattttgtcctttgtttttctgacaatttgatttcataatatattttataaactaagacagttatttaaaaagcattttgcatactataattgtgacatagtctgtcctcatttggttatgatttgcataattttttggatgcatcttgccacatttagtctgtttttgttactatagagtaagatggctcatatctgtcatcctagcattttaggagattgaggtgggaggatcacgtgaaaccaggagtttgagaccagcctgggaaacaaagcaataccaagtctctaaaataaataaataaataaattgagtccctttagacagatgtagttagattttctttcttttttttttttaattcctatactcaatttatgacttttggttgagaagtttagtttgtgagtagttacataatttcctgcatttgaaggaattacttttgacactttgtgg

SEQ ID NO: 4171 - DNA, 137 bp, Protomyxzoa rheumatica
tccattcctctgcactccattccattccattcctctgcactccgacccactccagtcaactccgtcccactctactccactccgttcgcttccattccactcaattgcattccattccatttcattccgttccattc

SEQ ID NO: 4172 - DNA, 149 bp, Protomyxzoa rheumatica
ttctacatccgaaggcagtaatatgccaatctaacaaacaagcacatacaccccctgagtctgtaaaataccaaaacaacaacaacagcaccagcagcagcagcaacaacaacaacaacagcagaacagaagctggaacacaaaaccac

SEQ ID NO: 4173 - DNA, 201 bp, Protomyxzoa rheumatica
gtggagtagagtggactggaatggaatggagttgaacggaatggaaagtagtagaatataatagaatggagtggagtggaattgaagtgagtggagtggagtacaatggagtgcagtggactggggtggagtggaatggagtggtctagaattgaattgaattgaatggactagaagggaatagaggcgaatggagtggag

SEQ ID NO: 4174 - DNA, 148 bp, Protomyxzoa rheumatica
gaaatcccgtttccaacgaagggctcaaagagggccaattatccacttggagactttacaaagagagtgtttccaaactgctcgattaaagaaaggttaaactctgtaagttgaacacacacatcacaaagtgttttctgagaatgat

SEQ ID NO: 4175 - DNA, 153 bp, Protomyxzoa rheumatica
gaaagcgaatgttcaactctgtgacttgaatgcagatatcacaaagcagtttctgagagtgcctctgctaaattttatatgaaggtattccggtttccaacgaaaccgttagagctatcgaaatatcctcttggagtttctacaaaaagagtg

SEQ ID NO: 4176 - DNA, 131 bp, Protomyxzoa rheumatica
tatatgtatgttattattgcctattgattgtgtaaagtggcctaggaagcattccgttgtgtttttgcacgtttctcaaataaattccaccttaaaaatataaataaatgcttttttgttgtttttagaca

SEQ ID NO: 4177 - DNA, 317 bp, Protomyxzoa rheumatica
tggaatggattggaatgaaatggactggaatggaatggaatgaatggaatggaaatgactcgaaaaaacggaatgaaatggacacaaacggaatggaatggacttgaatgaaattgaatggaatggtctcataagtaatggagtgcaataggctcgagtggaatggaatggaatgcaatggactcgaatggaatgaaaaggaatagaaatgactcgaattgaatggaatggaatggaatccaatgcaatagaattgattggaattcacatgaacggaatagaatacaatggagtcaaatgtaaaggaatggacatga

SEQ ID NO: 4178 - DNA, 245 bp, Protomyxzoa rheumatica
cattccattcaattccattccactccattccattccattccactacactccgctccactgcaatccactccattccaatccatcacactccctttcactacattgcattccactccactccactcccttccattccatcccattgcattcaactccactccactccactcctttcttttcacagtatctcaccctgtcaaccagtctggagtgaagtggcacaatctcagctcacatttcatttc

SEQ ID NO: 4179 - DNA, 239 bp, Protomyxzoa rheumatica
caccataggcctcaaagcgctccaaatgtacaattgcagattctacaaaatgagtgtttccaaattgctcagtcaaaagaaagttttaacactgtgaaatgaatgcacacatcacaaagaagtttatcagactgcttttgtctacattttatgtgaaaatattcccttttctaaaatgggccaaaaagccctccaaatgtccactttcagattccacaaaaagagtgtttcaaaactgc

SEQ ID NO: 4180 - DNA, 181 bp, Protomyxzoa rheumatica
acgtgcaagggagcccgctggcctctctgtgcccttgtccgtccgtgaaattccggctgaggctctcccaacaccttccgacgctctttcatcaaagcctgcagaatagttatatctcctgaatgattggctcagaaacaagtcacaatgccccctccctgtggagcctagagaagatttg

SEQ ID NO: 4181 - DNA, 215 bp, Protomyxzoa rheumatica
ataaaaacttcacagaagcattgtgagaaacttctttggttgtgtgcattcaactcaaactgttgaaattatgttttgcttgagcagttttgcatctctctttttgtagaatctgcaattggaaatttggagcccttgtggcgtatggagaaaaaggaaataccttcaaataaaaactacacagaagcatcttgagaaacctctttgtgatgtgt

SEQ ID NO: 4182 - DNA, 224 bp, Protomyxzoa rheumatica
gaactgtcagggatacacacacaacattcagtatgcagcaaggttcaaacccctcctttggctgctgcaagcatacctaatggcattcgattttgctcccagtgtaatcaagcagaaaatggttgatttctgcatttccaactgaggtacctgattcatctcatcgggattggttggacagtgggttcatcacatggagggttagccgaagcaggacagggcat

SEQ ID NO: 4183 - DNA, 351 bp, Protomyxzoa rheumatica
ctgagctgtgagtggctctacccagttcaagcttcctgaccactttatttacctactcaaacctcaaaaattgcagattcacctccccctgcccagctgctgccttgaaggttaatctcagactgcttccctagcagtgaacaaggctctctgggtgtgggactcaatgaacccagcacaggagagaatctcctggtctgccaggtgctaagactgtgggaaaagtgcagcatttgggtgagagtgtcctgtttttccaggtacagtctgtcatgccttccctcagctaggaaaggaaaatccctcaaacccttgcacttccttgatgagttgatgccctgtcctgcttcg

SEQ ID NO: 4184 - DNA, 127 bp, Protomyxzoa rheumatica
ggagatcgagaccatcctggccaaaatggtgaatccctgtctcttctaaaaatagaaaaattaactgggtgtggtgtcgcgtgcctgtaatcccagaaacttgggaggctgaggcaggagaatcact

SEQ ID NO: 4185 - DNA, 130 bp, Protomyxzoa rheumatica
caaacacccagaccacagcaggagtgttctggagtcttatgtgatggtcaaccattcacatgacagctggggtgttctggaaccctattgtgggacaaacattcctaccctcgtaggattgtactgcaat

SEQ ID NO: 4186 - DNA, 145 bp, Protomyxzoa rheumatica
catactattgcattccattcgagtacattcatttcgaataaattccattctagacctttcctttggagtccattctatttctccattgtattcgagtccactacatttgggtacattccattccactccgttccattctattcca

SEQ ID NO: 4187 - DNA, 306 bp, Protomyxzoa rheumatica
tggatggaactgaatggaatggaatggagtggaaaagaatacaattgaatggaatggcattgaatggaatagaatggaatggacacgaatagaatggaatggaatggaatggactcgattggaatggactcgaatggaatagaaacaaatgtaatgggatcgaatggaatggaatggaacagaatggaatggacccaaaagtaatggacttgaatggaatgggctcaaattgaatggactcgaaaaaatggtctcgaatgtaatttatacgatagaatggaattgaatggaatgcaatagtatgga

SEQ ID NO: 4188 - DNA, 460 bp, Protomyxzoa rheumatica
tggaatggaatggaatggaatggaatggaatggaatggacacacatgtaatggacttgaatggaatggaatcaaatagaatggacgcgaatggaatggtctcgaatggaatttatgaaaatagaatggaatcgaaattcattgaacattatggaatggaatcaaatggaatgaaatcgaatggaaggaaccggaatggaatgtactggaatagaacggactcgaatgttacggaaagaaaagtaagtgattcggatgtcttttaattgaatggaatgaaatcaaatggaatggaaaggaataaaatggaatggaatgaaatagaatgcaatagaatggaagggagtggagtcgagttgaatggaatcgaattgaatggaatagaatggaatagaatcaaatggaatggattcgaatgcaatggaaccgaatggaatggactggaacataatggaatcgaa

SEQ ID NO: 4189 - DNA, 213 bp, Protomyxzoa rheumatica
gacccggcgcccctacccagcactcaacagaaccttaagaaagcctccaggatgattccagaaacagtgcgcttcaagaactgcagtaaagttttaaggcccaaggcaggacccatcccataaggatggaagaggagctggatcacctcccaaggtgtgcctaatagtccaacccagagaggctaaaggcggtgagaaaggctcgccaattca

SEQ ID NO: 4190 - DNA, 700 bp, Protomyxzoa rheumatica
gatatttggagccctttgaggcctactgtggaaaatcaaatatattcacctaaaaactacacagaggtattctgagaaacttctttgttttgtgtgcattcaactcacatatttgaacttatcttttgattgtacagttttgaatctccctttttgcagaatctgcaagtggatatttggagccctattttgccctatagtggaaaagcaaatatcttcacataaacaaacacaacacagaagcattcagagaaactactttgtgatttgtgcattcaacacgcagagttgaaactatcttttgattgaacagctttgaatctctctttttgtagaatctgcaagtggaagtttggagccctttgtggcctatggtggaaaaggaaatatcttcaaataaaaactacacaaaaacattctgagaagctactttgtgatgtgggcattcatctcacaaggttgaacctatcatatgattgagcagtttcaaaacactctttttgtagtatctgaaagtggatatttggagcgccttgttgcctacaggagagaatcaaatatcttcacataaaaacaagacagaagcattctcagaactttctttgtgatgtatgcattcatctcatggagtttaacttttcttttgattgagaacttttgaaacactctttttgaagattctgcaagtagatatttggag

SEQ ID NO: 4191 - DNA, 310 bp, Protomyxzoa rheumatica
gtgatgtgtgcattgatctcacagagttgaaagtttatttggattgagcagttttgaaacactcttcttgtagaatctgcaagtggataattgtggagattggaggcatattgtggaaaagcaaatatcgtcatataaacactatgcagaagccttctgagaaacatctttgtgaggtttgccttcaactcacagagctggacctctcttttgagtgaccagtcttgaatctctctttttgtacaatctgcaagtggatatttggagcgttttgaggcctacatttgaaaatcaaatatcttcccttaaa

SEQ ID NO: 4192 - DNA, 504 bp, Protomyxzoa rheumatica
tatattttcttcttatttgatggccaataatttattctgtctaagtgagtaatcatggaaattgtcttaatttcaacatctattgtttatattatcctagtgtgaaagaaagacttatgcgatttgaagataatttttcaaaaactttgtaactctctctcttcaggtgtctttacttatttattttttgacagactctcaccctgtcgccaaagtgcagtggcacaatcttggctcactgcaacctccacctcccaggttaaagcaattctccagctgctgcctcttgagtagctggcattaaagttgtgcaccaccgcgcctggctaatttttgtatttttcatgaagctggggtttcaccatgttggccaggctggtcttgaacttatggcctcaagtaacctgcatgcctcagcctcccagagtgctgggattacaggcatgagtgatcactcttggcccttgggtgtcatttttaatttcgattgtggtaaaaatacat

SEQ ID NO: 4193 - DNA, 331 bp, Protomyxzoa rheumatica
aatggaatggattcaaatggattggactcaaatgaaatagaatcgaatggaatggaatcaaatgtaatggaatgaaatggaattcatccaaatgtaatggtctcgaatggaattgacacaaatagaatggacaagaaacgaatggtctcgaatggaatttattcgaatagaatggtaaagaatggaatggaatcggagggaatgaaatcgaatggaatggaatcgaatggaatggacaggaacggaatggactggaatagaacagagtcaaatgtaatggactgcaatgtaattcatttgaatggaatggaatcgaatggaatgtaatcaa

SEQ ID NO: 4194 - DNA, 470 bp, Protomyxzoa rheumatica
tgcattcctttccattccattcgattccaccctatttcactccactcaactccactccattccattccactgcttcccattccattcgactccatttcactccgctccactccactctcctccactccattccatcccattacattacttttcactccattgcattgcattcctttctttcacaggatatcactctgtcacacaggctggagtgcagtggcacaatctcagctaacattacatgtcaactttcctttgcattgcaatctattgcattgcagtccattgtattccattccactccactccactccattccactacatcccatttctttctgctccattccactgtattccactccacccctctccactcctcttcactccactgcactccagtccactccattccattccaatccattgctttccattccattccattccattccattccattccattaga

SEQ ID NO: 4195 - DNA, 150 bp, Protomyxzoa rheumatica
ataggcctcaatgggctcccaaatgtccattagcagaatgtacaaaaaaagtttccatactcctgagtcaaaataaatgtttgcctttgtgaggtgaatgcacacatcagaaagcagtttctcagaaagcttctttctagtttttatctg

SEQ ID NO: 4196 - DNA, 140 bp, Protomyxzoa rheumatica
ggacattcaggagctcactgaggccaatggcaaaagagagactatcccaggatagaaagtacaatgaagctttctgagaaactggtttgtgatgtgtgcattcatctggcagagataaaatttcttttgattcagcagtt

SEQ ID NO: 4197 - DNA, 105 bp, Protomyxzoa rheumatica
aggggaagctaagcatatgtcttattatttaatataacaatatgcaaaataggcacgtttccatgtatgatagtaggacataaagtgtgctgatacaaatatgaa

SEQ ID NO: 4198 - DNA, 142 bp, Protomyxzoa rheumatica
atcgaatggactagaacaaaacggaatggaatcgaatggaatggaatcgaaagacatcaattggagttgaatgaaatgtggtgaagtggtgtggagtgcagaggaatggagtggaatggaatggggtggaatggaattgaat

SEQ ID NO: 4199 - DNA, 314 bp, Protomyxzoa rheumatica
caaacaacagcgggagtgttctggaatcctaacaagtagacaaacatttagacaccagcagcagtgttctggaatcctatgtgaggaaaaacatattcagaccctcgtagggttattctggaatcctatatgaggaacatatattcagaccctcataggattattctggaatcctatgtgattcagacaccaggagcagtgttctggaatcctatgtgtgagacaaacattcaaacaacagtgtgagtgttcacgaatcctatgtgacggacaaacattcagaccttcctcgcagtgtttggaattctatgtga

SEQ ID NO: 4200 - DNA, 217 bp, Protomyxzoa rheumatica
attcagagcatcgtagccatgttctggaatcctatgtgagagacaaacactgagatcccagcagcagtgttctggaatcctatgtgaggtacaaacattcagaacactgcagaagtgttctggaatctcctgtgaggaagaaacttttagaccctcataaaagtggtctggattccgatgtgatggacaaacatttagaccccagcagcagtgttct

SEQ ID NO: 4201 - DNA, 150 bp, Protomyxzoa rheumatica
gtttctcagaattctactgtgtagtttctatgtgaagaaatttccttttccataataggcctcaaagctttccaattatccatttgcagattctaaaaaagattgttacaaaactgctcaatgaaaagaatggttcaactctgtgggagg

SEQ ID NO: 4202 - DNA, 288 bp, Protomyxzoa rheumatica
agcaggattgttctgtaatcctatgttacggacaaacatttagacctcagcaggagtgttctggaattctatgcgaggcacagtcattcgtaccctcgtaacagtgttctggaattctgtgtgagggacaagcattcagaacgtcgtagcagtgttctggaatcctatgtgaaggacaaccattcagaccacaggaagagtgctctggaatccccagtgaggaacaaacattcagacactagtaaaagtgttctggaatcctatgtgacagacaaacattcagacccc

SEQ ID NO: 4203 - DNA, 127 bp, Protomyxzoa rheumatica
cagatactctggttttatagaatctgcaaaagaatatacaggagcgtattgaggcctctgattgaaaatgaaatatcttcagagaagaactagacagaagctattggagaaatttctttgtgaggtt

SEQ ID NO: 4204 - DNA, 131 bp, Protomyxzoa rheumatica
ccttcgttagaagcgggaatatcttgacatataagctagacagaaacattctcagaaagttctgtgtgatgagtacattcagctgacagagatgaacccttcttttgatagagcagttttgaaacactcct

SEQ ID NO: 4205 - DNA, 210 bp, Protomyxzoa rheumatica
agctctgatgacaaccctgtgtgacatgtatggttgtcagaggcagagagttgctaaataatcacacacaactggtggaatgccagagagtttggttttacttggtcatcttcctgtttgcttactatttgtcccatctgtagtttgttctcctgttcctctttgacttcttttgaatttgttgagtatttttatttcatttaatctttt

SEQ ID NO: 4206 - DNA, 169 bp, Protomyxzoa rheumatica
tgacaggtattgttgtcgaggcagagagttgctaaataatcacacacagatggtggaatgccggagagtttggttttaattggtcatcttcctgtttgctttttatttgtcggatctgtagtttgttctctttttcctctttctctgacttcttttgaatttgttgagt

SEQ ID NO: 4207 - DNA, 189 bp, Protomyxzoa rheumatica
tgtgagttgaatgcaaacctcacaaagatgtttctcagaaggcttctgtatagtttttatatgaagatatttgcttttccacaacatacctcaaatctctccaattatccacttgcagattctacagaaggagtgttttaaaactgctcaatcaaaatacactttcaactctgtgagatcaatgcacac

SEQ ID NO: 4208 - DNA, 394 bp, Protomyxzoa rheumatica
tgcatatgtctacatgccagcattattttatttatgtgcatttcctttgacgtgaattttacttatttctattttttcattttaatccgtggactccataaaggcaaaaaatacaatgtaaaacaaagagaggaatatataaacaaatgactcacaagagatttattcatcatttgttgattgtggaaatgcacagagcactctggaaacatagctgggagaacagtcgaatggagtgggttaaagcagagaaccggtgtggcttggtcctagattctcttgcccaaaacgctctacacaatagctggaaaagactaaaacaacaacaaaacctccctgtgacagaatagtcattcatgcctcaataagggacaacaaatatgccactgaagat

SEQ ID NO: 4209 - DNA, 81 bp, Protomyxzoa rheumatica
tcatgcctcaataagggacaacaaatatgccactgaagatgtacccacaagtacattaattagtagagatacatacaattt

SEQ ID NO: 4210 - DNA, 273 bp, Protomyxzoa rheumatica
tacccacaagtacattaattagtagagatacatacaatttattttgggattaatgaaaacatgtattacctactgatttagggacaattaatttatccaaagaaacaatgtaataacttaaaccaaagaaatatacatttagtcttcaatgaaattaatactgtagaaatataattcagctgcattaacaatttcactactaatatggagattctacatgattccatataggtgtttccactagaacacatcttgcttttatacctatgcatc

SEQ ID NO: 4211 - DNA, 122 bp, Protomyxzoa rheumatica
gagaaaggaaatatcttcaaataaaaactacacagaagcactctgagaaacatcttgatgatgtgtgcattcaaatcacagaggtgaacttatcttatgattgagcagttttgaaacactct

SEQ ID NO: 4212 - DNA, 165 bp, Protomyxzoa rheumatica
gaatcatcatcgaatggaatccaatgggatcactgaattgaatggaatgatcatccaatggaatcgaagggaatcattgaatggaatcaaatggaatcctcgaaaggaattgaaaggaatcattgaatagattcgaatggaatcatcatggaatggaatcgaatg

SEQ ID NO: 4213 - DNA, 203 bp, Protomyxzoa rheumatica
tgaaagaaaaaaaaaacaaaaagaaaagaaaaaaagatattatgaagtatagcttatatcaatcggctctcactgtaccttgagagattcagaaaatcgctacttaatgacagaagaaaacaccagctaacatgttttggggaaaatacacgtcttcctaaaattggtaaaatctacttcacatgaaaagagataagtaaagt

SEQ ID NO: 4214 - DNA, 239 bp, Protomyxzoa rheumatica
gctccaaatatccacttgcagatactgcaaaaagagtgtttcaaaactgctcaataataagataggtccaactctttgtgatgaatgcacacatcacaaagaagtttctcagaaagtttctgtctagtttttatgtgaagatatttcctatcgccccataagcctcaatcggcttacaaatatcgttctgcagattatgaaaaacgactgtttcctgactgctcaatcacaggaaaggt

SEQ ID NO: 4215 - DNA, 134 bp, Protomyxzoa rheumatica
tggaatcgaatgcaatcatcaacgaatggaatcgaatggaaacgtagaatggaatccaaagtaatcgtcatcgaattgaacccaatgtaattattaaatggactcgaatggaatcatcgaatggactcgaatgg

SEQ ID NO: 4216 - DNA, 177 bp, Protomyxzoa rheumatica
agattctacaaaaagagtgtttcacacctgctgaatcaaaacaaaagttgaacactctgagatgaatccacacatcacaaagaagtttcactgagagcttctttctactttttatcaagggatattcatttttccccataggcctgaagggcttttcaaatgtcccttagcagattc

SEQ ID NO: 4217 - DNA, 158 bp, Protomyxzoa rheumatica
ggattccagaacactgctacgagggtctgaatgtttgtcctgctgataggattccagaacactcctgcagtgttctgaatgtattttcctcacgagattccagaacaatgctacgagggtcttaatgtttatccctcacatgggattccagaacacct

SEQ ID NO: 4218 - DNA, 139 bp, Protomyxzoa rheumatica
tgaatggagaggaatggaatggagtggattggaatgaagtggaaatgaacgaacgggagtgcagtgtaatggagtggagaggaattgaatggcttggactggaatcgaatggagtggaatggaatgtaattaagtggaa

SEQ ID NO: 4219 - DNA, 126 bp, Protomyxzoa rheumatica
gtgatgtaactcttttctagtctctgcctacagagtgcgttgtgacatcactctccttggatcacctggggtatgtaactcttgtctaggctccgcctatgggggcattgtgacatatctctgcac

SEQ ID NO: 4220 - DNA, 278 bp, Protomyxzoa rheumatica
tcagcttctacagttaagtctttttttaaaaaaaaatacccttgatggttgtgaatatgctgcattgaatataagggtgcagataatttttgagatgctgattttattttgtttatttacagaagtgaaatttcaggattgtacgatagtctattttttaaaataaactgcttactaattttcatgactcttccagtctgcaactcattaaaactgtacagaaatattttgtcacatccttgttaaaacttgttatgtttcttttttgatattaacca

SEQ ID NO: 4221 - DNA, 188 bp, Protomyxzoa rheumatica
tcaccgctttctttgattaggaaagggaattacctgaccccttgtgcttcccaggtgaggtgatgcctcaccctgcttcggctcatgcgcggtgtgctgttcccactgtcctgcacccactgaccagcactccccagtgagatgagactggtaccttagttggtaatgcagaaatcacccatcttctg

SEQ ID NO: 4222 - DNA, 128 bp, Protomyxzoa rheumatica
cacttgcagattctacaaaaagtgtgttacaaaactgctctatctaaagaaagtttaaagtcggtgggttgaacgcacatatcacaaagtagattcagagaatcattctgtctagtttatctatgaag

SEQ ID NO: 4223 - DNA, 152 bp, Protomyxzoa rheumatica
actctctttttgtagaatctgcaagtggacatttggagtgttttgtagcctatggtagaaagggaaatatctttacatacaatctagacagaagtaatctgagaatcttctctgtgatgtgtgcattcatctcacagagttaagactttatt

SEQ ID NO: 4224 - DNA, 175 bp, Protomyxzoa rheumatica
ctgaatgtttgtccctcacataggattccagaacactgctgctgtggtctaaatgttggtccctcacataggattacagaacactgccacgagggtctgaatatttgttcctcacaggggattcgagaacactcctgctgtggtctgaatgtttgtcaatcacataggattccag

SEQ ID NO: 4225 - DNA, 153 bp, Protomyxzoa rheumatica
tagtatctggaagtggacatttggagggctttgtagcctatctggaaaaaggaaatatcttcccataaaaacgacatagaagctatctcaggaacttgtttatgatgcatctaatcaactaacagagttgaacgttcccttagacacagcaga

SEQ ID NO: 4226 - DNA, 188 bp, Protomyxzoa rheumatica
gaatggactggaatggaatggactcgaatggaatggactgcaacaaataggaatcgaacggaatgaagtcgaacagaaaggaatggaatggaatggaatgaaaaggaatggattcgaatggaatggagtcgaatggaaaggaatacagtggaatggaatcgaatggaatggaattgaatggaatcgaa

SEQ ID NO: 4227 - DNA, 208 bp, Protomyxzoa rheumatica
cctgggtgatcattgcagggatatgtcacaaagcaccctgaggcagatcctagaaaagagttacattacctaggtgatcagggcagatatttgtcaaaataccctgtaggcagtgcttataaaagtgttacaacacctaagagatcagtgtagagatataccacaaatttcctctaggcagaacttagatgagttacatcatctgggt

SEQ ID NO: 4228 - DNA, 252 bp, Protomyxzoa rheumatica
ggagtggagtggaatggaatgaaatgtaatggacgcgagtggaatggactcgaatgtaatggacccaaactgaatggacctgaatgcagtagactggaatggaatggcctcgaatgcaatggaatctaacggaatggaattcaaaggaatgaaattgaatggaatggaatcaaatggaatggaactgaatggaatcgaatgacatcaaatggaattgaatgggatgccgtgaagtagagtggagtggagtgg

SEQ ID NO: 4229 - DNA, 517 bp, Protomyxzoa rheumatica
aatgatttaaagagttgaaactgttgctgggctggatggttctgggttcttttttgataacatataggtagattgctgggtatgtgtgtatatacatatgtatggggtaacctgcagtctacatgggtaagtctagatttagaatggtgaaatttatagaattacaggtttttccttcacaatctggtttcaccggcattttggtaagcataattgacctttgctgtgtgctagggtgctacaatatgcaatgccaacaatctttttctggggtcctaggggaagaagatagagttactcttggcatgcatacatatttgtagtcattttctatagtatctttctaaaggtaggttaccacagacaggggagtcttggactgctgcctgacaagcatcaaaatacagagaaataggcccttggtaaaagggagggaccctggtttggtttaagaggggaccatcctttgatccctcacgatgagtctcttggcaatatttcctcagtagctgcttga

SEQ ID NO: 4230 - DNA, 174 bp, Protomyxzoa rheumatica
tggacattaggagagcgttgtggtctgtggtggaaaaggaattatcttcacataaaatctagacagaagcaatctgaggaacgtctttttgttgtgtacattcatctcacagagttaaacatttcttttgattgagcagttttgaaaacctctttttgtagagtctgtaagtgg

SEQ ID NO: 4231 - DNA, 132 bp, Protomyxzoa rheumatica
ctgctgctgaattctgagtgtttgcactcacatatgattccagaacacttctgctctggtctgaatgtttctacctcagagcggattccagaaaattgctgctggtttctgagtgtttgtccctcacgtacg

SEQ ID NO: 4232 - DNA, 145 bp, Protomyxzoa rheumatica
gtaatttggaaacactttttttgtagaatccggaagtggaaatttgacgggctttgtgctctattttggaaaagaaaatatcttcagataaaaactacacagaagctttctgggaaacttcgttgttatgcgcgcattcaagtca

SEQ ID NO: 4233 - DNA, 158 bp, Protomyxzoa rheumatica
cagcaaatatatattatatactgtacataaaatatcaaagtacccagaatatgtattatatactgtacataaaatatgaaagtaagcaaacatttgtaataaaatgtacataaagtaacaaagtactcaaactacatattatatacagtatataaaat

SEQ ID NO: 4234 - DNA, 221 bp, Protomyxzoa rheumatica
ggacaaacattcactccacaacaagggtgctctggaatcctaagtgagtcacaaacattcagacgacagtaggagtcctctgaaatccaatgtgaggaacaaacatttataccacagcagaagtgtgctggaatgttatgtgcgggacaaatattcagaaactcaaagcagtgttctcgaatcctatgtgagggagaatcatttcgacccatgtatctgtg

SEQ ID NO: 4235 - DNA, 359 bp, Protomyxzoa rheumatica
attccagaacaccttagctgtggtgtgaatgattgtccctgacatacgattccagaacattgctgcagggttctgcgtgtttctccctcacataagattccagaacactgctacgaggggatgaatgactgaacctcacataggattccagaacactcgtgctattgtgtgagggtttgtccctcatatagtattcccaaacacaactgctgtggtctaaatgtttgttcctcgcataggatttcagaacactcctgctgtcatctgaatatttgtacttcacataggattccagaacactcctcctgttgggttctgagtgtttttccctcatgtaggattccagaacacagatacat

SEQ ID NO: 4236 - DNA, 266 bp, Protomyxzoa rheumatica
tacactgaatgaaagtgcaagcgaacagtggaaatatttgtcagaaaatacaactgtgaacaatctgctataaattctccatgtacagatgaattgacagaaacttatggggggttagttaaggacctgtggtcaactcaatcctccagatgttctaggatttagccatgaatcaagtagggccttccaaaatctgtctgggaccacactgtttcagcaaccagaaaaacctcattacaggagttatgctttagcactaagtgact

SEQ ID NO: 4237 - DNA, 134 bp, Protomyxzoa rheumatica
aaacctcattacaggagttatgctttagcactaagtgactctttctactgcaaaatgctaaaagtgtttatttccaggttggcagtaaaaaaaacttttcactacatcatctctgtgaccaatgcagtcagtgt

SEQ ID NO: 4238 - DNA, 344 bp, Protomyxzoa rheumatica
cttttcactacatcatctctgtgaccaatgcagtcagtgttccagactttggtgacagcaagtcttcctgtcccatgagaatgcagcatgcactccttccaggttccattccaatcatgtaacaaacgtgactgcctttttgttgcagcatcagaaagaccagaggacacatttgtactccagttccatggcttataacctgcatatgtctacatgccagcattattttattaatgtgtatttcctttaacctgaattttacttatttctatcttttcattttaatccatggactccataaaggcaaaaaatacaatgtaaaacaaagtgaggaatatataaac

SEQ ID NO: 4239 - DNA, 196 bp, Protomyxzoa rheumatica
tctcaacctgatggtactgtttttctgctctgatctttaggaaagagtgaagctttcccgtgcattcccgccacttccttgcagttttctttttatacttttcggttaactaatgtatttattaatttatttgagatggagtctggttctgttcatcaggccatggcgcggtatcgggccacttaaaccactgcct

SEQ ID NO: 4240 - DNA, 271 bp, Protomyxzoa rheumatica
tggaatggaatggagtggagtggaatggaatggagtggagtgcactggaatgcaatggaatggaacggaatggaatggaatggtgaaattaaatgtgagctgtgattgtgccactgcactccagcctgggtgacacagtgagatgctgacaaaagaaagaaatggaatggaatggagtgcaatgaaatggaacggaatggagacgagtggagtggagtgcagtagaatggagaggaatgaaatggattggaatgggatggaattgaatgga

SEQ ID NO: 4241 - DNA, 213 bp, Protomyxzoa rheumatica
actcagaacacaacagcagtgttctggaatcctaagtgaggaacaaactttcagaccacagcaggagtgttttggaatcccatgtgagggacaaaccttctgaagacagcaggggtgttctgaaatcctacctgagaaacaaacatttagatcacagctggagtgctctggaattctatgtgagggacaaacattcagacgacagcaagattg

SEQ ID NO: 4242 - DNA, 148 bp, Protomyxzoa rheumatica
gtttgaggccttcgttggaaacgggatttcttcatgtaatactagacaggagaattctcagaaatgactttgtgatgtgtgcattcaactcacagagcttaaactttcttttgatagagcagttttgaaaatctgcaagtgggtattt

SEQ ID NO: 4243 - DNA, 179 bp, Protomyxzoa rheumatica
tggattgctttgaggatttcgttggaaacgagattatctccatatgaaaagaagaagcattctcagaaacttctttgtgatctttgcattcaagtcacggagctgagcattcccttttacagagctggtttgaaacagtctttttgtagtatctggaagtggagattccgaacgcttag

SEQ ID NO: 4244 - DNA, 597 bp, Protomyxzoa rheumatica
ggaaagaactacgattgaatggatcggaaaggaatggtattgaatggaatggaagtgaatggaatggaatggagtggaatggaaggtaatggaatagaatcgaatggaatggaaaagaatggaatggaatggaatggaatggaatggactgcaatggaatggaatgtactcgaatctactgaactggaatggaatggattagaatggaatggagtcgaacggaacggaatcaaatggaatggattctaatggatttgaatccaaagaaacaaaaaaaaatcgaaagcactctaatgaaaggaaattgaatggaatggaatatattggacttgagtggaatggactcgaaaggaatggacttgactggaatcatcttgattaaagtggacccaaatggattggaatagacaggaatggaattgaaagaaatagaatcaaatggagttgactcgaatggaatgtaatcaaatgataaggaatcagctggaatggaatagaatggaatggacttcaattgaatggatttgaatggaattgtctcgaatggaattgaatggaatggataggagtggaataaaatggaatggaatggaatgg

SEQ ID NO: 4245 - DNA, 147 bp, Protomyxzoa rheumatica
aggcaagaccctcacctgcaaaaagattatgacttggtaaggctcagatattcattagcattttttaacactgacgtattttaacttaaggtatgcacacagattttagacatgctattaattactaattaataattaaatactcat

SEQ ID NO: 4246 - DNA, 188 bp, Protomyxzoa rheumatica
tctgggtctgtcaatgtctgaggaggtaggacctggctgtggtatatggatctgggtctcttcatgtctgaggaggtaggaaactgttacaggcctgaggatctgggtctgtcattgtctaaggaggtaggatctggccccagtatgaggatcggggtctgtccatgtctgagaaggtaggatctgac

SEQ ID NO: 4247 - DNA, 165 bp, Protomyxzoa rheumatica
gtttccatctgtggatatttagtttttccacataggtttctttgagtgccaaaatgtccccttgaagattgtccaaaaagagtgtgtccaacctctggaatcaaaagaaagatttgactctctgagatgatttacacatcacaaagcagtttcacagagatcttt

SEQ ID NO: 4248 - DNA, 182 bp, Protomyxzoa rheumatica
ttacaaatcacaaagcagtttcacttagcttctttctgggttttacctgcacatattggttttaccaaacaggcttcagtgggctttgtgatatgtgaattcatctcacagaggtaaatttttcttttgattaaccaggttcaaaacactttttttggagaatctgcaaagggacatttggg

SEQ ID NO: 4249 - DNA, 123 bp, Protomyxzoa rheumatica
ttcaaatctgtgaggtaaatgcacacattgcaaagcagtttctcggaaagctcatttctggtttttatcttaagatatttcctttttcattgtagtcctcaatgatctcccaaatatccctat

SEQ ID NO: 4250 - DNA, 159 bp, Protomyxzoa rheumatica
ttgtccattctgcatacagccatttgggagctcatttatgccaatggtgaaaaagggatatcccaggataacaagtagatggaaaatatctgtgtaactgctatgtgatgtgtgcattcatctcacacagttaaatctttcttttctttcagtattttg

SEQ ID NO: 4251 - DNA, 244 bp, Protomyxzoa rheumatica
ttcgatgatgattccattcaagtagattcattgattccattggagtccattcaatagttccatttgattccattcgatgtttccattcgattccacttgataattccatttgagtccatttgatcactccgttcaagtccatttgacgattccattcgattccatttgatgattatctcaatcgattccatttgatgattatcccaattaattccattcgatgatgattccattcatgcccctt

SEQ ID NO: 4252 - DNA, 122 bp, Protomyxzoa rheumatica
tctttttgtagaatctggaaagggatatttggggaccctttggggcctatggtgataaaagaattatcttcacataaaaactagacggaagctttctcagaaaattctttggatatgtgcat

SEQ ID NO: 4253 - DNA, 149 bp, Protomyxzoa rheumatica
ttccattccatttctttcttttccatttaaatggattctgttccattcgattacattctgttcaaatacattgcttttgagtccattccattcgattacattcagttccattgaattccattccattcctttccattccattcaattcc

SEQ ID NO: 4254 - DNA, 149 bp, Protomyxzoa rheumatica
attaacatacaagtatcagttttgtttctatatactagcaacaaaccagtaaaaaagaaaaaatgccatttacaatagcaacaaaataatacatttcttagtaataaatttaaccaatgtggtgaaagatttttacaataaaaaataaa

SEQ ID NO: 4255 - DNA, 164 bp, Protomyxzoa rheumatica
gggatggagtggagtggaatggaatggaatggaacagaatggtgaaatgaaatgtgagctaagattgtgcaattgcattccactctgtttgacacagtgagattcacttgaaataaaggaattgaattgaatggagtagaatggaatggaatggagtggagtgg

SEQ ID NO: 4256 - DNA, 153 bp, Protomyxzoa rheumatica
gaatggaatggactcaaattgaactgaacgtattggtatggagtggactcgaattgaatggaatgtagtggaaataattgaactcgaatggaatggcatggactcggaatccaatcgatttgaaagaaatggaatgaaatggaatggaatgga

SEQ ID NO: 4257 - DNA, 293 bp, Protomyxzoa rheumatica
aagaaagtttcaactctgtgaagtgaatgcacacttcacaagaaatttctcagaatgcttctgtgtaatttttatgtgaacatacttccctttccacaatagtcaacaaagccctgcaaatatccacttgcacattctagaaaaagagtgtttcaaaactgctcaatcaaaggaatggttcaactctgtgcgttgaattcacacaacacaaacaagtctctgagaatgcttctgtctagtttttacgtgaggatatttgcttttcaaccataggcctcaaagcactgcaaata

SEQ ID NO: 4258 - DNA, 204 bp, Protomyxzoa rheumatica
caccagcctcacacactctctagattctaggtcaacaaggctgcagcaggaacactgagaaaagggagcagaagtgaagtctccttagttggccaaaagacagccttctgaaagctgtgtatgaaataagaatattgcagacccaataatttatgtattaatttttgagataatagtagatttgtatgcagctatagagaataa

SEQ ID NO: 4259 - DNA, 167 bp, Protomyxzoa rheumatica
gatgtggttattaaaaaagcaaccagaaagatgcttgtggtgatggaaatgttttatatcttggttgtatcaatatcaatattctgattttgttaatgtacggtatttttgcaagcaatttctattggaataatggggtaaaagttgtatggaatctctgatttatt

SEQ ID NO: 4260 - DNA, 198 bp, Protomyxzoa rheumatica
ttcaactctgtgagttgaatacaaacatcacacagaagtttctctcaaatattctgtccagtttttatgtgaagatacttcctttttcacaataggcctcaaaccgatcagaaatatccctttgcagattctagaaaaaaacggtttccaaacagcataatcaaaagaaagattcaactctgtgagatgaaagcacac

SEQ ID NO: 4261 - DNA, 312 bp, Protomyxzoa rheumatica
ggacaaacattcagaccacagcaggagtgttctggaatccaccgtgaggaacaaacattccgaccctcgtagcagtgttctggaatcctaagtgatggataaacatttagacccagtagcagtgttctggaatccccagtgaggaacaaacattcagacaatcgtagcagttttctggtattctatgtgagggacaaacattcagaccccagcagcagtgttctggaatactatatgaggcacattcattcagaccctcgttgcagtgatctggaatcctatgtgagggacaaacagaacacagcaggagtg

SEQ ID NO: 4262 - DNA, 362 bp, Protomyxzoa rheumatica
ataggattccagaacactgctgctgggttctggatgtttgtccatcatataggattccaccacactgctgctggggtgtagatttatgggcgtcacctagattccagaacactgctgcaggtttctgagtgtttctccctcacatagaattctagaacactgcaactagggtctgaatgtttgtccttaacataggatttcagaacactcccgctgttggttgaatgtttctccctcacataggattccagaacactgctcctggggtctgaatgtttctccctcacatgagattcgaggacactgctgctggggtctacatgtatgtccgtcacataggattccagagcactcctgctggg

SEQ ID NO: 4263 - DNA, 304 bp, Protomyxzoa rheumatica
tgtccctcgcataggattccagaacactgctgagactgtctgaatgtttgtccctcacatattattccagaacattgctacgattgtctaaatgtttgtccctaacatagcattccagaacaatgctccgagggtctgaatgtttgtccctcacatatgattctggaacactgatacgattgtctgaatgtttctccctcacatatgattctggaacactgctacgagggtctcaaaatttgtctctcacatagaattccaaaacactcctgctgtgttctgagtgtttgtccctaacatagga

SEQ ID NO: 4264 - DNA, 149 bp, Protomyxzoa rheumatica
caatcattagataggttcaaccctgtgagatgaatccacacataacaaagtagtttttcagaatgtttctatgtagtttttatttgaaggtatttccttttccaacataagtcgcaaggggctccaaatatccacttgcagattctaca

SEQ ID NO: 4265 - DNA, 156 bp, Protomyxzoa rheumatica
aaaggaatggtctcaaatggaatttatttgaatagaatggaatcgaatgtaatgcaatagtatggtttggaatagaatcgaatggaatcgaatggaatggaacggaatagaatggactggaatagagcaaaatcgaatgcaatggattgcaaagta

SEQ ID NO: 4266 - DNA, 144 bp, Protomyxzoa rheumatica
agactatcgcaagagtgttctggaatcctatgtgaggggcaaacattcagactccagcagcgttgttcttcaatgctatctgagggacaaactttcagacaacagcaggagtgttcttgagtcctatgtgagggacaaacattc

SEQ ID NO: 4267 - DNA, 137 bp, Protomyxzoa rheumatica
caacagtttggaaacactgtttttgtacattctgtgaatggacatttcagagcccattgaggccaatggcaaaaaggaatattccaggctgaaaactagaagggaactatctgagaaaatgctttgtgatgtatgca

SEQ ID NO: 4268 - DNA, 180 bp, Protomyxzoa rheumatica
agtggatatttggagccctttgtggtctatggaagaaaagaaaatatattcaaataaaaactacacagaaacattctcagaaacttctaggtgatgtgtgcattcatctcacagagttgaacctgtgttttcactgagcagatttcagacactctttttgtagaatcagcaagtggatat

SEQ ID NO: 4269 - DNA, 135 bp, Protomyxzoa rheumatica
ctgcaatgggacattgagcagaccttcgagaccaatagggaaaaactgaatatcccctgataaacactagaaaaaagttaactgtgaaactgcttagtgaggtgtttattcatctcacagagttcaacctttctt

SEQ ID NO: 4270 - DNA, 172 bp, Protomyxzoa rheumatica
tttttactgggaatatttggctttttcccataggccttataggcttccatatcacccttcaaagattctttaaaaggagcatttccaacgccctgaatcaacagaaaggtttaactctgtgagacgaacccatacataacaaagtaacttcacagatagcttctttctagtt

SEQ ID NO: 4271 - DNA, 159 bp, Protomyxzoa rheumatica
ttcaactctgtgagatgaatgcacacatcacaaagaagttactcagaatgcctctgcataggttttgtgtggaaatatttacttttccacaataggcatcaaagctctcaaaatatcctcttgcagattttacaaaaaccgtgtttcaaaactgctcta

SEQ ID NO: 4272 - DNA, 409 bp, Protomyxzoa rheumatica
taaaaactacatggaagcattctgggaatcttctttgtgatgtgtgcattcatcccacagtgttgaacctttcttttggtagagcagttttcaaacactgtttttgaaaaatctgcaagaggatattttgagctctttgaggcctattgtggacaagtaaatatgttcacataaaaactataaagaggcattctgagtaacttcatttgatgtgtaaattcactgaacagagatgaacctatcttatgattgagcagttttgaaacactctctttgtataatcttccagttgatatttgaagcgctttgaggtctattgtggaaaagaaatatcttcacataaaaagtgcatagaagcattctgataatcttctttgtgatgtgtgcattcatctcacagagttgaacc

SEQ ID NO: 4273 - DNA, 167 bp, Protomyxzoa rheumatica
tagcagtgttctggaatcctatgtgggagacaaacattcatacaatcttagcagtgtacgggaattctttgcgagggacaaacattcagaccccagcagcagtgttccagaatcctatgtgagctataaacattgatacaacagtgggagtgttctggaatcctatg

SEQ ID NO: 4274 - DNA, 228 bp, Protomyxzoa rheumatica
ccattccattccattcctttcggttccattagattccattgctttcgagtccattccattccattccacacctttcgaggccattctaatccattacattccagtcgagtcctttcaattccattccattctattagagtccattccattccattggagttcattacattccattccattctagttagtctattcctttccttcccattcaactcctttccattccgt

SEQ ID NO: 4275 - DNA, 145 bp, Protomyxzoa rheumatica
aattttattcgatttcattcgatgatcatttcattctatcccaatagatgatgccattcgatcccattgaatgattatcctgttcgattccattcgatgatgactccaatcaattccagtcaatgatgattccattcacatccat

SEQ ID NO: 4276 - DNA, 146 bp, Protomyxzoa rheumatica
aatagaatcatccaatggaatagaattgatgtatcatcaaatgacatcatacagaatcattgaatgaaattgaatttaatcatcatcgagtggaatcgattggaatcatgaacgaatggaatcaaatggaatcacagaatggaatc

SEQ ID NO: 4277 - DNA, 136 bp, Protomyxzoa rheumatica
cagtaaactctcgcaaggacaaaaaaccaaacaccgcatattcttactcataggtcggaattcaacaatgggaacacatggacacattaaggggaacatcacactctgaggcctgttatggggtggggggaagggg

SEQ ID NO: 4278 - DNA, 391 bp, Protomyxzoa rheumatica
gtgtgtgttgagagaacctgagatctacttttgcaacaaatttcaagtacacagtattgttaactatagtcaccattgtgtacattaggtccccagcagttactcaccttataactgaaagtgaaccccttccatggatatctccccactttccctcttactagcccatggggaccaccgttctactctctttccatgactttttaatttttatttgcttttctagattttacatacaaacgagatcatgcagtaattgtccttctgtattcagcttaagctttctcttagcataatatcttcaaaatttatcagtattttttgtaaatgaaagtttcattttttattaaagctgaaattatatacctctcagtttatttatttatctgta

SEQ ID NO: 4279 - DNA, 144 bp, Protomyxzoa rheumatica
tgcagacatatttcacaatgcccctgcaggcagagattaagcaagagttacatcacatatatgatcagttcagagatatatcacaaggacccctataggcagaacctggacaagagttacatcccctcggtgatcaatgcagtg

SEQ ID NO: 4280 - DNA, 184 bp, Protomyxzoa rheumatica
aagatatttcctttttcatcataggcttcaaatcgctctatgtttccatttacagattctacaaaaagagtgtttctaaactgctctaagaaaaggagggttcaactctgtgagttgaatgcaggcatctcaaagaagtttctgaggattcttctgtccagtttttatgtgaagatatagattt

SEQ ID NO: 4281 - DNA, 176 bp, Protomyxzoa rheumatica
gattttacaaaaagagtgcttccagactgctaaatcaaaagaaaggttcaactctgtgggacgagtacatacatcacaaagaagtttcttagaatgcttctgtcaagttatcatatgaagatattttgttatccaccataggcctcaaagcgctccaaatgtccacttgcagattc

SEQ ID NO: 4282 - DNA, 134 bp, Protomyxzoa rheumatica
gggctcatgtgatcctcctacctcagcctcctaagtagctgggactacaggcatgtgtccccatgcttggctaatttttaattttttgtagagatggggtctcattatgttgcccaggctggtctcgaactcca

SEQ ID NO: 4283 - DNA, 258 bp, Protomyxzoa rheumatica
actcctgctatggtctgtatatttgtccctcacatatgattccagaacactgctacgagagtctaaacgtttgtccctcacacaggatttcaaaacctttctgctgggttcggagtgttggtccctcacataggtttccagaacaatcctggcatggtctgaatgtttatccctcacatagggttccagaacactgctgctggtttcagtgtgtttgtcgctcatgtaggattccagaacactgctatgagggtctga

SEQ ID NO: 4284 - DNA, 488 bp, Protomyxzoa rheumatica
gagcagttttgaaactctctttttgtataatctgcaattggacatttgtagcacttttaggtctgtggtggaaaaggatatatcttcacaaaaactagacaaaattattctgagaaacttctttgtgatgtgtgcgttcatctcgcatacctgaacctttcttttgatcgagcagtttggaagcacactttttgtagaatctgcaggtgggcatctggagcgctttgaggcctatggtagaaaaggaaatatgttcacataaaatctagacagaagctatctgagaaacttctttgtgatatgtgcatacatctcacaaacttaaacctttgttttgactcagaagttttgaaactctctttttgtagaatctgcaattggacatttggagccctttgaggcctacggtctaaaaagaaatgtcttcacataaaaactagatagaagaattcagagaaacttcttcatgatgtgtgcactcatctctc

SEQ ID NO: 4285 - DNA, 540 bp, Protomyxzoa rheumatica
gaagctcgccgcgctgctgacctgctgagcactttagctgggcgactggacagatcccagggacaggtagtagttgatggagaaggtgcggagcaagtggtgaagctcgctgtgtacggggaggaaagcgagaggacaggactcaggttttgccgaggtcctgaagataattattgaaatgcattaaaacggtatctcacttagatattattattgtttacattgttataagaaacatataaaattgacaattatttacaattttacaataatttacaatgacaataattatatagtttagacttttcagcacattgacattattcgacgtatctctagaacatttttatcttacaaaactaaaactcaatacacctgaaacaactgcctgtcttctcctttgttcagccctttacaaatgctatcttattctctgtttctaaggatgttactactttagatattttatacatgtggatacactcagtatctgtcttgtagctggcttattttatttagcataatgtcatcaagatttta

SEQ ID NO: 4286 - DNA, 160 bp, Protomyxzoa rheumatica
gcaacctccgcctcctgagttcaagccatgctcatgcctctgcctccagagtatctgggattacaggcatgcaccaccataccctgctaatttttgtatttttagttgagacgggatttcactatgttggccagtctagtctcaagcttctggtttgaag

SEQ ID NO: 4287 - DNA, 169 bp, Protomyxzoa rheumatica
ctgagaaactacattgtgatgtgtgcattcatctcacagagttgagcctatcttttcattgagcacttttgaatctgtccttttgtaggacctgcaagtgtatatttggcgaactctgtggcctatggtggaaaaggaaatatcttccaaaaaaatacatagaatcatt

SEQ ID NO: 4288 - DNA, 281 bp, Protomyxzoa rheumatica
ccgagactccgtctcaaaaaataaatcatggtaataaaataaaattaagttaaaaaaagaagttatgcataattcctaacgtgtttgatgcctcgaaaggcgagaggtgtatgtgtatgtcacagtggggttgttttcttcttttttcccggaaacttactttttaattattttgtttcatttcatttttatttttattttattttgaagtccagtgtcacaaacatggcgataccccgtctctactaaggtacaaaaattagcggggcattatggcatgt

SEQ ID NO: 4289 - DNA, 149 bp, Protomyxzoa rheumatica
ttccattcaattccattccatactattgcattccattcgaaaccattgcattcgaataaattccataagagactattcctttcatgtccattcaatttgagtccattccatttgcgtccattatattagggtccattccattcccttcc

SEQ ID NO: 4290 - DNA, 243 bp, Protomyxzoa rheumatica
atctatgttgggttagagttgcggtttgagagagggtgaatatggtgaggcctggagtcctttagtcacacattacaacaaatgaatctgttctatagaaaaaaatcattacttttcattgattctgtttccatgcaacctagcgcatgggctggaattctggcacttagtagctgtttaatattaagcaagtgactcaacctctctgagtctcagtttactcctctgtaagatgggaatgat

SEQ ID NO: 4291 - DNA, 228 bp, Protomyxzoa rheumatica
aggtcttactctgtcacccagggtggagcatgatctcagctcactgcatcctacacctcctgggctcaagccatcctactgcttcagcctcctgagtagctgggactacaggaacatgccaccatgcttagctaagttttgtatttttttagcagggccgggtttcaccatgtttgccagactgctcttaaattcctgacctcaagttatctgcccgcctcagcctcc

SEQ ID NO: 4292 - DNA, 153 bp, Protomyxzoa rheumatica
caggatcaacactgtgagatgaatgcacacagcacaaggaaatttctcagaacacttccatctagtttttatgtgaagatattctggtattcaccatagacctaaagggatcccaaatatccctttgtggattctacaaaaatactgtttcca

SEQ ID NO: 4293 - DNA, 448 bp, Protomyxzoa rheumatica
tggaatggaatggagtggagtggagtggattggagtggagtggaggggattggagtggagtggagtgaagtggagttaaatggagtggaatggtatggaatggaattgaatggaatggagtggaatggaatggaatggactcgaacggaatggactcaagtggaatagaatggaatggaatggcatcgaagtgaatggaatggaaacaaatggaatggaccccattgcaatggactcgaattgaagggactgaaatagaatggattggaagggaatggtcttgaatggaatttattcgaatagcatggatttgaaaggaatgaaatagtatggaatcgaatccaatggaatggaatcgaatggaatggaacagaatggaatgaactggaatacaacacactctaatgtaatggattgcagtgtaattgactcgaatggaatggaatcg

SEQ ID NO: 4294 - DNA, 150 bp, Protomyxzoa rheumatica
ccattcgagtccattcaatggtgattccattcgattccattcgatgattccatttcattccattggatgatgattgcatttgattctattcgatgattccctttgattccattcaaagtagattccattcgagtccattcaatcattcca

SEQ ID NO: 4295 - DNA, 214 bp, Protomyxzoa rheumatica
tccacttgcggattctacaaaaacagtgtttcaaatctgctctatgaagagaaaggttaaactctgtgagttgaatgcacacgtcagaaagaagtttctgagaatccttctgtttagtttgtatgtgttggtattcccgttttcaacgaaggccccaaagcagtccaaatatccatttgcacaatcaacgtaaagagtgtttcaaaactgctct

SEQ ID NO: 4296 - DNA, 152 bp, Protomyxzoa rheumatica
ttatttgaagatatttccttttcctccatagggtgcaaaagtctccaaatattcagttgcacaatctaccaaaaggtagagtcaaaactgcgcaatcaaaagacaggtttacctctgtgagatgaatgtacacatcacaaagaagtttctca

SEQ ID NO: 4297 - DNA, 159 bp, Protomyxzoa rheumatica
gaagcattctgacaaatttctttgtgatgtgtgcattcatctcacaagtttgaacctttgatttgattgaacagctttgaaacactgtacaatctacgtgtggaaatttggagtgcttcgaagcctatggtggaaaaggaagtatcttcatataaaaac

SEQ ID NO: 4298 - DNA, 81 bp, Protomyxzoa rheumatica
tttgcctgtataaatattgcccctattttgtttatgacttgtatattttcttcttatttgatggccaataatttattctgt

SEQ ID NO: 4299 - DNA, 133 bp, Protomyxzoa rheumatica
atatccacttgcagattctacaaaaagaaattttcaaaactgctatatgaaaaagatatcttcaactctgtgagacgtatgcacacataacagagaactttctcagaaggcttatgtgtagtttttatgtgaa

SEQ ID NO: 4300 - DNA, 153 bp, Protomyxzoa rheumatica
acttggagggcttgcagccatcactcaaggaatcagaacacattggcctctactgcagcatcagggaacaaagcaaaaacagcctctcagctctcaagagacacacttatgtgtataaacatacgttatataaatttatccagtgactttgag

SEQ ID NO: 4301 - DNA, 150 bp, Protomyxzoa rheumatica
tccattctcagaatgtagcaaaacagtgtttccaaattctgaaccaaaagaatggtttatctctgtgaggtaaatggaaacatcacagagaattttttcagaaagcttctttttagtttttatctgaaagtattttctttttcagcatag

SEQ ID NO: 4302 - DNA, 177 bp, Protomyxzoa rheumatica
tttcaccctatagtggaaaagcaaatatcttcacataaacaaaccctacagagaagcattcagagaaagtcctttgtgatgtgtgcattgaacatgcagagttgacactatcttttgattgtacagttttgaatacgtctttttgtagaatctgcaagtggaagtttggagctgttt

SEQ ID NO: 4303 - DNA, 252 bp, Protomyxzoa rheumatica
gaatgcattggaatcaaatgtaattgaatggaacggaatcgataggaatggaagggacccaaatggaatggactaaaaaagaacggactcgaatagaatggaatctaaagaatgtaatggaatgcaaccgaacggaatacagtcgaacggactggaatacaatgtaagggaatggaatggaaaggactcgaatgtaatgaactggaatgaaatggaaccgcatggaatggaatgaaatggaattgactcgaa

SEQ ID NO: 4304 - DNA, 123 bp, Protomyxzoa rheumatica
atcttcacataaaaactagatagacgcattctcaggaacttgtttgtgatggttgcattcaattcacagatttgaacctttcttttgatatagcagctttgaaacactctttttgtagaatct

SEQ ID NO: 4305 - DNA, 591 bp, Protomyxzoa rheumatica
ccatctgcaaaatctgcaaaaatataccattgggattttgataaaaattacattaaatttttatattactataaataacactgatatctttcttatttttttttttggagatagagtttctgtctcccaggctggaggacaatggcacgatctcgcgattggctcacttcaacctccgcctcccaggttcaactgattctcgtctttcaaatatgtaaaacaaatattgacagaagtcaagcaagaaatacatagcaacacaacaatggtggacttcaagactccactttcagtaatgactagaatagtcagaagtaatatcagtaagaaagccaaacctgaacattatagacccaaccagcatttacagaactctccaatttaaaggagcaaaatctgcaatattctaaatcacacatggtacattctgttaggatacatgtcttattaaatttaagaaaactgaagtcatgcaatgtaaatgaaactagaaatcaaaagcaagaaaatgtttcagatacgtaaataagaggaaattaagcaaaatcttacatatagtcttgctcaagtgtcaggtgatttaatattgtt

SEQ ID NO: 4306 - DNA, 369 bp, Protomyxzoa rheumatica
tctcagaatgcttctgtgtattttttataggaagatatttccttttcctcaatatgccacatagcactgcaaatatccacttgcagatcgcactaagagtatttccaaactgcacagtcaaaagaaaggtgaaatgaatgcacatattgcaaaaagtatctcagactcttttgtgtagtttttatttgaagatattttcttttttacaatagacctcaaagctctccaaagatccacttgcaaattccacaaaagagtgtttcaaaactgctccatcaaaagaaagattcaactctgtcagatgaatgcgcacatcacaagatagtttgtcagaatgcttctgtgtagtttttatgtgaagatatttcc

SEQ ID NO: 4307 - DNA, 192 bp, Protomyxzoa rheumatica
gcatgatttttctggaatcttatgtgaggtacaatcattcagaccctcgtagcagtgttctgcagtcctatgtgagggacaaacactcagaacccagcagcattgttctggaatcttatatgagggaccatcattcagaccacagctggcatctcctggaatcctacgtgtgggacaagcattcagactctc

SEQ ID NO: 4308 - DNA, 194 bp, Protomyxzoa rheumatica
acataggattccagaacactgctacgagggtctcaatgtttttccttcacataggattccaacacactcctgctgtgttctgagtgtttgtccctctcataggattcgaaggcaatctttctgtggtatgaatgtttttccctcacatagggttccagaacaatgctgctgggttcggagtgtttgtctctcac

SEQ ID NO: 4309 - DNA, 378 bp, Protomyxzoa rheumatica
cacagagttgaaccttcttttagatagagcagatttgaaacacactttctgtggaatttccaattggagatttcaagcgcttcggggccaatggtagaaaaggaaaaatcttcacataaaaactagacaaaatcattcccagaaactgtgtagtgatgtgtatgtttaactcacagagtttatcctttcttttcatagagcagttgggaaacactctgtttgaaaagtctgcatgtggatatttggaccgccatgaggcgttctttggaaatggtatttcttcatttaaggctacacagaagaattctcagtaacttccttgtgttgtgtgtattcagctcacagagttgaaccttcttttagatagagcagatttga

SEQ ID NO: 4310 - DNA, 280 bp, Protomyxzoa rheumatica
gagaggaacgcacacatcacaaagtggtttctcagaatttgtctttctagattttatgagaagataaatcctttttcaccatatgtcacaaagccttccaaatgtacaaatgcagattcgacaaaaagagagtttaaaaactgctcaatcaaaagaaagggttaactctgtgagatcaatacacaaatcacaaagaagtttcacagattgcttcttgcagattctacaaaaagagtgtttccaaaatgctcaatccaaagaaaggttcaactctgtgaga

SEQ ID NO: 4311 - DNA, 145 bp, Protomyxzoa rheumatica
agtgtttccaacctgctgaatcaatagaaagttttaattctgtgagctgaatccgcacatcacaaagcagttttaaaggtgttttctttccagtttttatctgaaaatattcggcttctccttataggcctcaatgggctcccaa

SEQ ID NO: 4312 - DNA, 461 bp, Protomyxzoa rheumatica
gggaggtggaggttacagtgagccaatatcgtgccattgcactccagactgggcaacaagagtgacactaagtctaaaaaataaaattaaaattaaaaaagaaagttataaggggcttacattttataactcaacaagaaaagccaaagtatctatccctttcagaaaataaacatgtaatttaattatgttcataacaaatcatttagtaaacaattaatcatatgtgaacacttccaggaggcgcaaagtcccagctcctaaaacttaacattaccctcaaacacccagatggcagcatatggaatagagttattcactttcacaagttctctcttttgaaaaaaagaataacttatgtgataaatttatgtaatttgacaattaatctacctcatgtgcttgcagatatgtattcatttcctaccaccgtagtggaagagagattttccctatcttta

SEQ ID NO: 4313 - DNA, 328 bp, Protomyxzoa rheumatica
atttggagcgcttagattcctattgtggaaaaggaaatatctttacataaaaactgcatagaatcattctgagaaacttctgtgggatgtgtgcattcatctcacaatgttgaacctttcttttcattcagcagttttgaatctttctgtttgtagaatctgcaagtggatatatggagagctttgaggcctatggtggaaatggaaatatcttcatataaaaactagacataagcattcagaaaaagttttctgtgatgtgtgcattcacctcaaagtgctgaaccttactttcaatggagcagttttgaaacactctttttgtaga

SEQ ID NO: 4314 - DNA, 336 bp, Protomyxzoa rheumatica
tttctcagattgcttctgtctagattttatgtgaagatatatcctttcctatcataggtctcaaagcactccaaatgtccacttgcagattctacaaaagagagtttcaaaactgctcaatcaaaagaaagggttaactctcagatgaatgcagacatcacaatgaattttatcagattgcttctttctagattttatgtgaagatatttccgtttctactgaaggccacaaaactctgtctaggatatttcattttccattacaggcctcaaagtgctccaaatgtccactttcagattctacaaaaagagtgtttccaaattgctcaatgaaaa

SEQ ID NO: 4315 - DNA, 224 bp, Protomyxzoa rheumatica
atgttttaactctgtgagatgaatgcacacatcacaaagcagtatctcagaaaccttctatctaattttttttctgaagttattttctttctcatcatcagcctaaatgtggtcccagatgtccattcgcagaatgaaaaaaacagtgttgaataaaaagaaaggtttacctaggtgcagtgaatgcagacatcacaaagcagtttatcagaaagcttcttcat

SEQ ID NO: 4316 - DNA, 205 bp, Protomyxzoa rheumatica
ccaatcctttccattccattcttttcgagtccattgcattgcattgcattcctttcaagacctttccattccatacaagtccattccattccattcaattcgagtccatttcattccattccattccgtttgagtcaatttcattccaacccattccattcgagtccattccattccattgcattcgaatcctttccattccatt

SEQ ID NO: 4317 - DNA, 142 bp, Protomyxzoa rheumatica
gaaacttctttgtgatgtgtgcattcatctcacagagttgtacctttttttttgattgagcagtattgaaacactgttgttggataatctgcaagttcatatttggaacgctttgaggcctattgtggaaaaggaaatatct

SEQ ID NO: 4318 - DNA, 242 bp, Protomyxzoa rheumatica
caccataggctgcaaagcgctccaaatatccctttcagattctacagaaagagtgtttcaaaactgttcaatcaaaagagaaactcaactctggtgatgaatgcacgcatcacaaagcagtttctcataatgtttctgtctagtttttatgtgaagatatttcattctccactataggccgtaatgcactcctaatatccacttgcagattctacaaaaagactgtttccaaactgctcaat

SEQ ID NO: 4319 - DNA, 207 bp, Protomyxzoa rheumatica
gtttgtttgttattcttaaccaaatgctcttacagatgacacatagtacccatgctttgattgttttttgtttttttttttcaccttaggtcaattgcctttcattttattcatcaaactgtatttactgtagatagacattgtagttctcatgtgccctatggatttgtactttgttacaaatatgaattctcaggctgagtatat

SEQ ID NO: 4320 - DNA, 336 bp, Protomyxzoa rheumatica
atgtttgtccctcacgtaagattccagaacactgctacgatgctctgaattattttccctcacataggattccagaacactcctgctcttgtctgaatatttgtccttcacaaaggattccagaacactactgctgtgatctgaatggttgaccctcacacaggattccagaacatttctgctgtggtctgggtgtttgtgcctcacatgggattccagaacaatcctcctgtggtcttaatgtttctacttcacataagattccaaaacatttatgctgtggtctgagtgtttgtccctcaaaaaggattccagaatcctgttaggagggtctga

SEQ ID NO: 4321 - DNA, 224 bp, Protomyxzoa rheumatica
gagggacaatcattcagaccacagctggggtgttctggaatcctatgtgtgggacaagcattcagaaactcgtagcattgttctggaatcctatgtcaggaaaatacattcagaacacatcaggagtcttctggagtactttgtgagggacaaacattcagactctcgtagccgtgttctggaatcctatcagagagaataattcagaccctcctaacaggatt

SEQ ID NO: 4322 - DNA, 144 bp, Protomyxzoa rheumatica
catttatctgggctctgcctacaggggcgttttgacatagttctgcacagatcacctatgttatgtaactctggtccactctctgcctacagggggcattgtgcattatctctacactgatgactcaggtgatgggactcttct

SEQ ID NO: 4323 - DNA, 133 bp, Protomyxzoa rheumatica
cattctattccattcgatgattgcatttgatcattattccattcgattccatacaatgattccattggcttacatgtgatgatatttccattcaattccattgcatgaatccacttgattccattcgatgatg

SEQ ID NO: 4324 - DNA, 170 bp, Protomyxzoa rheumatica
caaatggaatcatcatcgaatggttttgaaacgaataatcaaatggaatcgaatgtaataaatcgaatggaaccgaatggaatcatcatcgaatggaatcgaatggattcatcatcaaatgaaataaaaaaatcatcgaatggaatcgaatggaatcatcattgaatgga

SEQ ID NO: 4325 - DNA, 130 bp, Protomyxzoa rheumatica
tcccctgtaggcagtgcctagacaagagctgcatcacctcagagatcagtgcatagatatatcacaaagcactctgtaggcaaagacaatacaagacttacatcacctaggtgatcagtgcagtgatatg

SEQ ID NO: 4326 - DNA, 169 bp, Protomyxzoa rheumatica
acaagacttacatcacctaggtgatcagtgcagtgatatgccacacaattccctgtagacacagactagacaagagttacataacctgggtgatccgtacagatatttgacacaatgcaccaatagatagagcctagacaagacttccatcacatgggtgatcagtcca

SEQ ID NO: 4327 - DNA, 238 bp, Protomyxzoa rheumatica
tgcttgtccctcacataggattcccgaacacagctgctgaggtctacatgtgtgtctgtcatagaggattccagaacactgcttctgggttcagagtgtttctgcctcacacagaattccagaaaactgcgacgaggttctgaatgtttgtccctcacatgggattccagaataactctactaaggtctgaatgtttgtgcctctcataggattccacaacactgctgctggtttcta

SEQ ID NO: 4328 - DNA, 204 bp, Protomyxzoa rheumatica
cattcagaccacagcaggattgctttgggatcccatgtgtgggaaaaacagaaaacagcgggagagtattggaatcctatgtgagggacaaaacattcagaccctctttgcagtgctgcggaatcctatgtgagggacaaactttcagaaaatcacagcagtggtctggaatcttatgtgagagacaaacattcagaactcagc

SEQ ID NO: 4329 - DNA, 130 bp, Protomyxzoa rheumatica
atggcatgtaatggaatcaaacggaatggaatctaataggaaagaatcgaatggaatgcaaaggaaaggaatgtgatggaatggaatggatttgaaagcactgcaatggaacggaatggactcgaatgga

SEQ ID NO: 4330 - DNA, 299 bp, Protomyxzoa rheumatica
aaggacccaaaatatatattatatactgtacagaatataacaaattacccaaaatatatattataaactgtacataggatatcaaagtacccaaaatatatatgatatcctctacataaaatatcacactaatcaaattataaattatatactatacataaattatcaaagtacccaaaatttacattatatactgtacataaaatatcaaagtacacaaactacatattatgtactgtacataaattatcaaagtacacaaaatatatattatacactgtatgtaaaatatcaaagta

SEQ ID NO: 4331 - DNA, 225 bp, Protomyxzoa rheumatica
atcgaatgcaatcaacatgaatcatccaatggaatccaatggaatcatcatctaatggaatcgaatggaatcgtcatcgaatggattcgaagagaatcatcaaatggaattaatgcaatcataatcgaatggaatcatcgaatggaattgagtagaatcatcatcacatggaatcgaatggaataatcgaatggaatcgaatggaatcatcatcatatggaattg

SEQ ID NO: 4332 - DNA, 130 bp, Protomyxzoa rheumatica
tgaaatcaaatggaatggaaaggaatagaatggaatggaatcggatagaaaggagtgtaagggaatggagtcgaaagcaatagaatcgaatggaatggcatcgaatggtatggaatggaatggacacaaa

SEQ ID NO: 4333 - DNA, 138 bp, Protomyxzoa rheumatica
aactctgtgagatgaatatacacagcacaaagaagtttatcagaatgattctgtgtagtttttatttaaagttatttccttttcctcaataggcctcaaagtgctccaaatatccaattgcatatactacaaaatgaa

SEQ ID NO: 4334 - DNA, 611 bp, Protomyxzoa rheumatica
tgccttccttgtggcagatccccatgtgtctttctaaaatcagcacagtcagactgagagtgattggaattctgcagctgtgagccctctcgaatcttccttgaattcagatgcaactaatctcctccttggtggacaccaggaagtaggctgtagagcattctgtgaccctgaagaatgacacgatgttcttgatgaagagggtggatattcctgaaggagaaataatgttttctcaacagcagaagcagatatcaagtttattcaatgactgggtcatggaaaatcctgttctctacaggttgatgctgcattccaggcaaacccacaccctcggtgtatgccagaggcttcagaaacacaaaggagctcatacaagatgagtgccaggcagctatgaaaggagctgagattctaaaccacaaatacagacaactacgaatataggtgagacgaaaaactgtaaaccttcttaagggtgtacaacatgtaacaacggctcccattagctcatgtttagataccaaggaaataatagcaggaatgttttatgttcacattccaaacaaaacctattatcattcatcgtcagttcatttagtcctgtttta

SEQ ID NO: 4335 - DNA, 155 bp, Protomyxzoa rheumatica
tgggagatgaatgctcccatcacaaagtagttccccagatagtttccttctgttttttatcctgggatattcgcttttcctcattggcctaaattagatctcaaatatccatttgcagaatggacaaaaacagtgtttccaagctgctgaatcaa

SEQ ID NO: 4336 - DNA, 122 bp, Protomyxzoa rheumatica
tgagaaactgctttgtggtgtttgcattcatctcacagatgaaaactttcttttaattcaggagtttggaaacaatgtttttttccatcctgaaaatggacatttgggagctgtttgaggtc

SEQ ID NO: 4337 - DNA, 155 bp, Protomyxzoa rheumatica
tacgaggttctgaatgattgtacctcacatagtattccagaaccctcctgctccgttctgaatatttgtcccacagataggattccagatcactgctcttaggttctgcacgtttgtccctcaaataggattccagaacactgctgctgtgttca

SEQ ID NO: 4338 - DNA, 174 bp, Protomyxzoa rheumatica
agttaaacttttccttttttcagcagtttggaaaatctctttctgtctattctgcaaatggatgtctgggagctcattgaggccagtggcaaaaaaggggatatccaaggatttcagcatgaaggcagctatctgagaaaccactttgtgatgtaagcatgcatttcacagagt

SEQ ID NO: 4339 - DNA, 302 bp, Protomyxzoa rheumatica
attccattcaattccattcaattcgatttcattccattcgagaccgttccattctagtctgttccttccgagtccattccattccattccattcgaatccactccattcgattccatccctttcgattgcattctgttcaattccattccattggagaccattccataacactccattccgttccagcccattgaattccattcatttgcattccttgccattcgagtccattccgtttgcgtccattcaattcaaatacgttccattgcagtctacaccattcgattcatttccattccat

SEQ ID NO: 4340 - DNA, 262 bp, Protomyxzoa rheumatica
atttgaggcacaaacattcagaccctcgtagcagtgttctggaatgctatgtgatggagatccattcatactacagcagcagagttctggaatcttgtgtgagggacagacattcagaccacagccggagtgctatggaatcctatattagggacaaacattcagacccttgtaacagttttctgaaaccctatgtgagagagaaacattcggacctcagcagcagcgttctagaatcctatatgaggcacattcattcaga

SEQ ID NO: 4341 - DNA, 154 bp, Protomyxzoa rheumatica
ctcatagaattaaacctgttttttgattgagcactttggaaacactgtttttgtaaaatctgcaaagaaatatttgggagtgcattgaatcctattgtgaaaaaggaaatagcttcagataaaaattagaaagaggctttttgaggaactgctt

SEQ ID NO: 4342 - DNA, 626 bp, Protomyxzoa rheumatica
ttccattccattcgattccattccattcgattgcattccattttattccattccttttgaatccattccattccagtccattccaatcgagtccattccattcgattctattgcattccagtccattccttttgattccattcaatttgattccattccattcgagtcccttcctttcgagtccattcgattacagtccattccattccactccattcctttccattgcattccattccatccgattgtattccattcgagtcaattccattcaagtctattcccttctagtcatttacattcgagtacattccaatcctatccattccattttgttccattccattcgagtccattccattctagtccattccaatacaatccattacaatcgagtccatcccattatttacgattccattacattacattgcatttgaatccattccatttgactccattctttcgagtccattccattgcagttcattccattagattccatcccattcgagtccatcctactcgattgcattccatttgagaccatttcatttaattccattccattcgagtccattccattcaaatccttttcattcaagtccatttcattcaagtacatt

SEQ ID NO: 4343 - DNA, 180 bp, Protomyxzoa rheumatica
tgactatgagagcctgtcagatactatgtaggacagtgcttccctgtaacatgcacaagatttccatgatgatgatgactatttgagcctttcacatatgatgtaggacagtgtttccctgtaacatgcacaagattgccctgatgatggtgactgtgaaagcctgtcacatatgatgtt

SEQ ID NO: 4344 - DNA, 174 bp, Protomyxzoa rheumatica
gagaaaaagagaatatccccagataggaaggagaaagaatgtgtctgtgaaactgctttttgacgtgttgattcatctcagagctttaaaactttcttttgattcggcatgttgaaaacactttttttggagaatctgcaaagggatacttcagagtttattgaggcataccgg

SEQ ID NO: 4345 - DNA, 195 bp, Protomyxzoa rheumatica
agattgtccaaaaagagcgtttccaacctaccgaatcaaaaggatcatttatctctgtgagatgaatccacacatcacaacgcagtttcacagatagccgctttctagtttttatctggtgatatttgaagtttcccaataagcttcaatgggctccaaaatgttttttcacggattctccaagaagagtgttta

SEQ ID NO: 4346 - DNA, 203 bp, Protomyxzoa rheumatica
tgagaatgattctgcctagtttttctgtgaagataaggcgttttctaccagaggccacaaacggcactaaatatccacttggaaaccctacaaaaagagagtttcataactgccctatcgaaaggaaggttcaagtctgtcagttgaaagcacacatcaaaaggaagtttctcagaattcttctgtctagttttatatgaaga

SEQ ID NO: 4347 - DNA, 128 bp, Protomyxzoa rheumatica
ggttcctcagaggtcacggacacatacctgtccatggcccaggggtggggacccctgagttacattatacatactatcaatatctggctgtaccaaacagtattgtgaaaacatttatagtcctgttt

SEQ ID NO: 4348 - DNA, 158 bp, Protomyxzoa rheumatica
cattccattccattgcattccattccactcagatttaatccactctgttcaataccattccttctcattcccttccattctactccattccattcaactccactccagtatattcaattccattccacaccattctattccactccattccactgcac

SEQ ID NO: 4349 - DNA, 165 bp, Protomyxzoa rheumatica
gtagataaggaaatatattcgtataaaaactagacagaatcattctcagaaactactgtgtgatgtgtgcgttcagctcactgaatttaagctttctattcatagagcagtttttaaacactctgtttgtaaagtctgcaagtggatataaggacctctttgagg

SEQ ID NO: 4350 - DNA, 161 bp, Protomyxzoa rheumatica
tactgggatatccatgttttccccattggccacaatgagtcatcaaatggcctttcacagaatggacaaaaacagtgtttccaaactgctaaacccaaagaaagttttaactctgagattaatgctcacatcacaaagtagtttctaggaaaatttcttta

SEQ ID NO: 4351 - DNA, 251 bp, Protomyxzoa rheumatica
tcagtgttctggaatcctatgtgacggacaaacattaagtccccagaagcagttttctggaatactgtgtgaggaacaaacattcagaccctggtagtagtgttctggaatcctatgtgagagacaaacactcagaacccaacagcagtgttttggaaccctatgtgagggtcaatcattcaggccacagcaggattatgctggagtcctatgtgagggacactcagaacatagcaggagtgttttggaat

SEQ ID NO: 4352 - DNA, 176 bp, Protomyxzoa rheumatica
tttgtcccactcttaggattccagaacactgctgttggagtctgagtgtttgtccctcatgtacgattccagaacactgctacgtgggtctaaatgattttccctcacatcagattccagaacactgctacgaggctctgaatgtttgtcccacacataggactccagaacactcc

SEQ ID NO: 4353 - DNA, 173 bp, Protomyxzoa rheumatica
atggaatcgaatggaatcatctaatggactcaaatggaatcaccattgaattgaatcgaatggaattataaaatggacttgaaaggaattatcatggaatggaatcgaatagaaacatcatcaaatggaaacgaatagaatcatcaaatgaaatcgaatggaatcatcatcaa

SEQ ID NO: 4354 - DNA, 375 bp, Protomyxzoa rheumatica
gtgtttctccctcacataggattccagaacactgcgatgagggtctgaatgtttgtccgtaacataggattacagaacactcccgctgttgtgggaatgtttgtccctcacataggaatccagaacactgctaatggggactgaatgtttgtccctcacacaggattccagtacaatgttacgattttcttaatatttgtccctcacataggattccagaacaaacctggagggtctgaatgtttgtccctctcataggattccagaacactgctacgagggtctgagtgtttgtccataacatatgattcaagagcactcccgctgttgtttgaatgtttgcccctcacataggattccagaacactgctacga

SEQ ID NO: 4355 - DNA, 203 bp, Protomyxzoa rheumatica
aactacacagaagcattctgagaaacttctttgtcatgtgagcattcaacacacagagttgaacctatcttttgaaagaacagttttgaatcgctctttttgtataatctgcaaaaggatatttgaataccttgtggtctatggaggaaaaggaaatatcttcaaataaatactacacagaagcattctgagaaacttctttg

SEQ ID NO: 4356 - DNA, 229 bp, Protomyxzoa rheumatica
caagtggatatttggacctctttgaagatttccttggaaaagtgttcatcttcaaagaaaaactaaacagaagcattctcagaaacaactttgtgatgtttgtgttcaacttgcagagttgacctttcctcttgacagagcagccatgaaacattgcttttcttgaatctgcaagtggacatttggagagctttgaggcctgtggcggaaacgtaaatatctgcatata

SEQ ID NO: 4357 - DNA, 241 bp, Protomyxzoa rheumatica
aggaaggttcaactctgtgagttgaaagcacaaatcacaacgaagtttctgagagtgtatctgtctagtttcatgtgaagatatatctgtatccaatgaagacttcaaagtactccaattaaccacttgcagattctacaaagagtgtttcaaaactgcactatcaaaaggaaggttcaattctgtcagttgaatgcatacactacaaggaactttctgagaatgtttctgtctagttttt

SEQ ID NO: 4358 - DNA, 238 bp, Protomyxzoa rheumatica
gtaggattccagaacactcctgctgttgtctgaatgttggtccatcacgtaggattccagaacactgctaggagtgtttaaattattctccctctcataggattccagaacacaccggcaggagtctgaatgtttgttcctcacttaggattccagaacactcctgctgttgtatgaacgtttgtccctcacttaggattacagaactctgctgttggattctgagagtttctccctc

SEQ ID NO: 4359 - DNA, 130 bp, Protomyxzoa rheumatica
ccattcgatcatgattccattagggtccattcgatcattccattcgagtgcatttgataattgcattcgagtccattcaatgatttcatttgattccttttgatgattccattcgagtccgtttgatcat

SEQ ID NO: 4360 - DNA, 132 bp, Protomyxzoa rheumatica
ctgtaaatttagtctaggctctggctacacggcattgtgacatatctctgcacagatcacccacgtgatgtaactcgtgcctaggctctgcctacaatgctcttgtgacatatctctgcactgatcacccag

SEQ ID NO: 4361 - DNA, 258 bp, Protomyxzoa rheumatica
tcacacagaattccagaacactgctatgagggactgaatgattctcccacacacagaattccagaacactgttacgaatttctgaatgattgtcactcacataggattgcagaacactgcttctggggtctgaatctttgtctctcacataggattctggaacacttccgctggggtctacatgtatgtccatcacatgggattctagaacactgctgctgggatctgagtgtttctcactcacatataactccagat

SEQ ID NO: 4362 - DNA, 266 bp, Protomyxzoa rheumatica
tagcagtgttgtggaatcctacgtgggagacaaacactcagaacccagtagtagtgttctggaatcctatctgagggacaaaaattcagaccagagcaggagtgttctggaatcctatgtgaggtacaatcattcagacactcgtaacattgttctggaatcctaagtgagggacaaaaattcagacaatcctagcagtgttctggaaacctatgtgtgggccaaacattcggaccccagggacagtgttctgcaatcctatgtga

SEQ ID NO: 4363 - DNA, 954 bp, Protomyxzoa rheumatica
aaataactggcaacaaattccatgttcctgaaccggaagacttaatgaagttaagatgacaatactactacccaaagtagtgtacagatgtactgtaatcccaatttttaatttttccaacttttcttttgcaaaaacaaaataactcatttaaaacttcatatggaatttgaaaatcctctgaatgtacagaataatcttgaaaggaagaacaaaattagatggctcacaattttaaatttgaaaacatacaaagctactataattataacagtttgctagtggcataagaacaattgtagagatcaaataaataaaatagataatccaaaaaacccttgcataaattattgattgtctttcgacaagtgtgccttaatcattatgtaaagaaaaggacagtttgttccacaataaatgctgggaaaacaagtccacattgaaaccagtaaagttgaatctttatcacattccaagtacaaaaattaaataaaaatagattaaagacataagtgttcaactttagtggtttctaatggttgtttttatttatgtggggtcagtactaacatgaacacctttatacacacaaactagaaaactttaaagaaatggatacattactagatatacacactctcccaagattaagccaggaagacaattatttcctgaatggaccaataaaaagctctgatattatataggtaataagtagcttgccaatcaaaaaaataaaagccctggactttatggatttacagccaaattctaccaaatgtacaaggaagagctggtacaattcctacagaaactatccccaaaaattgaggaggacggtctcctccccaactcattctataaggacagcatgatcttgacaccaaaacctggcagagacacaacaaaaacacaaaattagccgggcttggtagcagacacctgtagtcccag

SEQ ID NO: 4364 - DNA, 150 bp, Protomyxzoa rheumatica
gattggaatcgaatggaatggaatggaaccgaatggaatggaatctaatgaaatcaaatggaatggaatacaatcaaatggaatggaattgaatgacatagaatggaatcgaatggaatgcagtgaagtggagtggagtggaatggagag

SEQ ID NO: 4365 - DNA, 144 bp, Protomyxzoa rheumatica
cgtgcattcatctcacagatttgaacattttttttgattgataagtttggaatcactctttttgtaaaatatgcaagtggacatttggagcgctttgtggcctgtggtagaaaaggtaacatcttcacatgaaatctagacaga

SEQ ID NO: 4366 - DNA, 141 bp, Protomyxzoa rheumatica
aatcatcatcgaatggaatcgaatgcagtaatcattgaatggcatcaaatggcatcatcatcaagtggaatcaaatggaaacatccaatggaatcgaatggcatcatcaacgagtggaatccaatagaatcatcaaataaa

SEQ ID NO: 4367 - DNA, 126 bp, Protomyxzoa rheumatica
attctattcgattacatttgatgatgaatccattcgaatccattcgatcatgattccatttatgtccatttgatgtttccatttgtttccattcaacgacaattccattcaagtccaatagatcat

SEQ ID NO: 4368 - DNA, 302 bp, Protomyxzoa rheumatica
acataggattccagaacactgctacgagggtctgaatgttgtcccacccacaggactccagaaaacatctgctgttttctgaaaatattttcctcacttaggattccagaacaatgctatgagggtttgaatgtttgtccgatatgcaggattccaaaacgtcccagctgtgttctgaatgattgtccctcacataggattccggaactctgctgctgggttctgagtgtttctacctcgcataggattccacaacactgctactggggtctgaatgcttgtctctcacataggattccaga

SEQ ID NO: 4369 - DNA, 227 bp, Protomyxzoa rheumatica
atccagtaattccactcctgggtatctactctgaggtaaataagtcattatatgaaaaagatactagcacacgaatgtttatagcagcacaatatgcaattggaagaatttgaaaccagtctaaatgcccaccaatccataagtggataaagaaaatgtggtataaatatttaccacatggaatactactcagccataagatagaatgaaataatgcattcacagca

SEQ ID NO: 4370 - DNA, 124 bp, Protomyxzoa rheumatica
agtctaagcagaagtactgaaaagaatccactggcctgggcaatgtggcgaaaccccatctctacaaaaatacaaaaaactagccaggtatggtaacacacacctgtagttccagctactcagg

SEQ ID NO: 4371 - DNA, 159 bp, Protomyxzoa rheumatica
aattgaattgaatggaatggaatggaatggaaagcattttaattgaatggacccgaagagaatggaatggagtggaatggaatgaagtggcctcgactgcaatagattgcaatagaatcatctcaagtggaatgtagtgaaatggaattgaatggaatg

SEQ ID NO: 4372 - DNA, 279 bp, Protomyxzoa rheumatica
tcatagagcagttttgaaactctctttctgtagaatctgcgactggatatttggagcccttagcggcctatggtggaaaaggaattatcttcacataaaaactacacagtatcattctgagaaacttgtttgtgatgtgtgcattcatctcacagatttgaacccttccatcttttgagcagtttgtacaccctctttttgtaaaatctacaagtggatatatggagcgctttgaggcctattgtggaaaaggaaataccttcacataaaaactccaca

SEQ ID NO: 4373 - DNA, 1205 bp, Protomyxzoa rheumatica
tcttttgatggagcagtttggaaacactctttctgtgacatctgtaaatggatattaggagtgctttgaggccaatggtgacaaaggaagtatcttcacataaaaactacacggaagttttctgagaaactacttgttgatgtgtccattgatgtaacagagttaaaactttctttttattgagcagtttggatacagtctttttggagaatctgcaaaaaacatttgtgagccctttattgcctatggtgaaataggaatcttcttcacatgtaaacaagacagaagcattctgaggaacgtcttcgtgacgtgtgcattcatctcacatagttgaaactttctttggattgagcagttttgaaacagtccttttgtaggatctgcaaggggatatttctgagcccattgagtactgtgatgcaatgtgaagtatcttcacataaaaactacacagaagctttctaagaaacttcgttgtgatgtgtgctttcatctcacagaattgaaactatcctttgattgaggagtttggaaacactctttttctaggatctgcaaatggatatttggagagctttagaggcccgtggtgaaaaacgaaatatcttcacgtaaaaactaaacagaagctttctgagaaactcccttgcgatgtgtgcattcacctcaccgagtggaaactttcttttgattgagcagattggaaagaggcttatcgtacaatctgcaaagggagaattctgatccgtttgaggcttatggtgaaagagaaatatcttcccataagaactagacggaagcattccaagaaattttttgtgatgtgtccattcacgtcacagagttgaacctctcctttgattgggcagtttggaaacagtctttttgtagaacctgcaaagggatatttgtgagccctttatggcctgtggtgaaatacgaagtatcttcacctaaaaactagacagaaggtttctgagaaacttcttggtgatgtgtgccttcatcttaccgtgttgaacctttcttttgattgagcagtttggaaagtctttctgtagaatctgcaaatggatatttggagatatttgaggcccgtggtgaaaaaggaagtatcgtcacctaaaaaccagacagaagatttctgaaaaacctctttgtgatgtgtgaattcatgtcacagaattcaacctttctttcag

SEQ ID NO: 4374 - DNA, 158 bp, Protomyxzoa rheumatica
gaattccaatcatgtcatgccccctttttatattttgaaaattccatctctatacctggcacagtggcttatgcataaccctaactggttctttatattgtttttttaaaaagtggattaggtctaataatctaataatgataatgttcaaaacctta

SEQ ID NO: 4375 - DNA, 146 bp, Protomyxzoa rheumatica
tgactccatttgattccattcgaggatgatttcattcacgtccatacaatgattccatttgatggtgattccacttaagtccattcgatgattccattattgttcattctataattccattagattccatttggtgatgattagat

SEQ ID NO: 4376 - DNA, 243 bp, Protomyxzoa rheumatica
ttctcagaaacttctctgtgatgtatgcattcaactcactgagttgatccttcctttttgtgagagcagttttgaaacagtcttcaggtaggatctgcaagtggatatgtggtgcaatttgaagactatgttggaaaagaaaatatcttcacagaaaaactagacagaagccttctcaggaacttgcttggtatgtgtgcattcaactcacagagctgagcctttctgttgagggagctgttt

SEQ ID NO: 4377 - DNA, 269 bp, Protomyxzoa rheumatica
ggctacgttggaaaaggaaatatcttcacataaaaactagacagaacaattctcacaaacttctttgtgatgtgtgcattcaagacacggatctgaacatttcttttcattgagatgtttgaaacactctttttgaagaatttgcaagtgcatatttggaccgctttgagaccttcgttagaaatgtgatatcttcacaaaaaatatatagaagcattctcagaaacttctttttgatgtgtgcattcaacacacggagttgaaccttc

SEQ ID NO: 4378 - DNA, 400 bp, Protomyxzoa rheumatica
ttcagaacccagcagcagtgttctggaatcctatgtgaggcaccatcattcagaccctcgaagcagtgttctggaattttgtgtgaggggcaaacattcagaccctcgtagcagtgttctgcaatcctgtgtgaggtactattattcagatgatggcaggagagttctggaatcccctgtgaggaacaaacattcagaccctcctagcagtgttctgtaaccctatttgagggacagatattcagacgacagcagggttgttctggaaccctatgtgggggacaatcacccagaacacatcagtagtgttttggaatcctatctgagggacaaacattcagaccctagtagcactgttcaggaatcctatgtgagggacaaacattcagacaatcgtagc

SEQ ID NO: 4379 - DNA, 157 bp, Protomyxzoa rheumatica
cagcagcagtgttctggaatcctatgtgagggacaatcatccagatcattgcgttagtgttctggaattctaagtgagggaaaaacattcataacccagcagcagtgttttgaaatgctatgtgaggggcaaacattcagaccccagcagcagtgtt

SEQ ID NO: 4380 - DNA, 131 bp, Protomyxzoa rheumatica
tacaaaaagacagattcaaaactgctcaatgaaaagagaggttcaacactctgagttgaatacacacatcaataataagtttctcagaatgcttctgtatagtatttatgtgaagatatttccttttccac

SEQ ID NO: 4381 - DNA, 177 bp, Protomyxzoa rheumatica
acgcatttaactcacagagttgaacctttcttttgagagagaagcttcgaaaatgtcttttggtagaatctgcaagtggatatttggagtgatttgaaacctattttgcaaaaggaaatatcttcacagaaacactagacagaatctctctcaggaactagtttgtgatgtgtgcat

SEQ ID NO: 4382 - DNA, 185 bp, Protomyxzoa rheumatica
cattccattcgattccattccatttgaatcaattacattgcaatccattacatttgtgtgccttttattccattccattcctttccggtccattccattggattccattccatactattgcataccattctaatccatgctattcgaataaattccattcgagaccattcctttccaatccattc

SEQ ID NO: 4383 - DNA, 201 bp, Protomyxzoa rheumatica
ggaccaagagaattttgagaactagccatctctcagtagccggctaataaaggactcctgaattcatctcaaagtgtggcgtttctctctaactcactcaggtatgacagtttcaactatggtagaagactcgaacaaggcaaatacagtcccctaaatttgactattatttaggttaatggtgagtttagaagaaataag

SEQ ID NO: 4384 - DNA, 196 bp, Protomyxzoa rheumatica
tttatagtttttattgaagatatttcctttctcaccataggcctcaaagggctcacaaatatcccattgcagattctacaaattgacagttttcaagctgttcagtcaaaagactgtttcaactatgtgagatgaatgcacacatgacagggaggtttctcagagaacttctgtctatttattatgtgaaggtatt

SEQ ID NO: 4385 - DNA, 312 bp, Protomyxzoa rheumatica
actctcaaagaagcattagataatatcaaatgaaaatacactctttattcaacaggatcaactaaaggggcgtgggggaaaggggttgatctgttcagtgtatgcaacagtgaagcagttggaatttcatagaaagaatatactcccagggcagaaggagatttgaactttgtatctacaaaggagaaagtcttatgatggcaggcttgcaggctttgttacattgagaatataaaaaggaatgaatttaaaagttttagtcaaactgccttagaaaaatagagatactctggcctgtacttaatgtaacac

SEQ ID NO: 4386 - DNA, 153 bp, Protomyxzoa rheumatica
ttttcatttacttcaattttccccgagttttgctctactgaaaagattttatctgctgtgtacttcttttttgcctatcttctctgaaggactctcctaacaatgagcttcccgatatgtgtcctgctgatcacaataagacatcatgactct

SEQ ID NO: 4387 - DNA, 159 bp, Protomyxzoa rheumatica
atattcgactttgtttatgtgccacttgttattaatctgttcattggtcaagggacatctggattgtttctgccttttggcttgtgttaataatattgcaataaatttggttgtgcaaatatctcttccagatctgcgttgtacattttaagtacatag

SEQ ID NO: 4388 - DNA, 127 bp, Protomyxzoa rheumatica
ataatctatggcctcaagccgatatttaaaatagtatgacagctcttcaaaaaatttaaaatgagattattatataatccagcaaacccccttctggctatgtacttaaaatatacaacagagatct

SEQ ID NO: 4389 - DNA, 225 bp, Protomyxzoa rheumatica
tcagtgcagagatatgtcacaatgtcccctgtaggcaaaggctaggcaagggttacatcgcgtttgtcatcagttcagggatatgtgaaaacgaccctggaggcagggcctaggcaactgttatatcccctaatgatcagtgcagagatatttcacaatactcctgtaggcatatcctagacaacagttgaatcacctgggtgatcagtgcagagatatgtcaca

SEQ ID NO: 4390 - DNA, 170 bp, Protomyxzoa rheumatica
ccaaagaaagttttaactctgtgagatgaatgtgcacgtgacaatgcagtttctcagaaagcttctctctaatttttatctgatgatatattctttttaattttaagcctcaatgtgctcagaaatatacccttgcagattctacaaaaacagtggttccaaacttctga

SEQ ID NO: 4391 - DNA, 213 bp, Protomyxzoa rheumatica
gatatttgggatcccgttgaaacctaaagggagaaaaggagtatacccagataaaaactagatataagctatctgtgaaacttccttgtgatgtgcggattcatcccacagagatagacctttctattgattcagtagttgggaaacattgtttttacagattctacggagagacatttgggagcccttggtggcctaaatggaaaaaccaac

SEQ ID NO: 4392 - DNA, 732 bp, Protomyxzoa rheumatica
gtgagtcatgctgctatgagcttaggtgtacgtgtattattttgtgtcttcgctttcacatcttttgcaacataccaagatgtgaaattgctggatcatacggtgattttgagtgtaaattatttcgttactatggtgttgttttatagcagctgcagcattttacatttccaccaagtgtacaagggttctaactgctccacttcctcaccaacacttgtgattttctgttttgttttgtttcttttggtagtaactatgctgatgtgtattaagtgatatatcatttggagttatatttgcattttactaatgattagttttgttgagcaccttttcatggacttattagccatttcacataatttttaaagaaatgtctgtttaagtattttgcccatattttaaacaagtattttgttttattattgctgaattgttctttgtatattctggatagagtcctctttatttttcttttgtttcttgcattttttgtgtcctgttaaaaaaaatcactgcgaaatccagcgttatgacatgttttacctacattttatactaagaattttgtagttttagctcttacatttaggtctttgatccagttagttaattttttcttatagtagaagttaagggcccagcttcactcttttacatgtgggcacccaatttccccagcactaattgttgtaaaggcagttcatttcccataaaaatcatttgacc

SEQ ID NO: 4393 - DNA, 122 bp, Protomyxzoa rheumatica
caaaaaagagtgtctcaaaactgctctatcaaaaggcaggttcaactccgtgagttgattgaacacataacaaagaagtttctgagaatgcttctgtctattttttctgtgaagatattccc

SEQ ID NO: 4394 - DNA, 429 bp, Protomyxzoa rheumatica
ttatgttcataacaaatcatttagtaaacaatcatatgtgaacacttccaggcggtgccaagtcccagctcctaaaacttagcgttaccctcaaacacccagatgacagcatatggaacagagatactcactatcagaagttctctgttttgaaaaaagaataactgatgtgataaatttatgtaatttaacaattaatctacctcacgtgcttgtaggtatgtattcatttcctaccaccgtagtggaagagagactatccctatcaatacacctggtaacattcccaacagtaagccgtgagattctgcttgaaatcacctctcagacaaataaaaaacagtcctgggaaatgtacgacactcattctgctaaagaaataggcaagtaacaatttttaacaagtgaaatatattactacttaatttt

SEQ ID NO: 4395 - DNA, 127 bp, Protomyxzoa rheumatica
tcaatcaaaggagaggtttaactctctgagatgaatccacatatcacaaagtagtttcacagatagcttctttcaaattttcatctggggttttcagtttttttccatagccatcaacgggctccca

SEQ ID NO: 4396 - DNA, 265 bp, Protomyxzoa rheumatica
caacagcgggagtgttctgaaatagtatgttattgacaaacattcagacccttgtcacagtgctctggaattcaagtgagggggaaacacacagaacccagcagctgtgttctggaatcctgtgtgacggacatacacatagaccccagcagcggtgttccggaatcctatgtgacggacaaacattcagactccagcagcagtgttctggaatcctctgtgagggaccatcattcagactctcgtagtagtgttctggaattct

SEQ ID NO: 4397 - DNA, 308 bp, Protomyxzoa rheumatica
ccaactctgtgagatgaatgcacagatcacaaagaagtttttcagaatgcttctgtgtagtttttatctgaagatatttccttttccacagaaggcctcagaggtctttaatatctacttgcagattctgcaaaatgagtgattcaaaacagctcaatcagaagatattttcgactctgtgagttgaatgcacacctaacaaaaaagtttttcacaatgcttctgtgtagtttttagatgtagatgtttgctttccctcattaggtctcaaaacgttgcaaatatccacttgcagattctgcaaaaag

SEQ ID NO: 4398 - DNA, 265 bp, Protomyxzoa rheumatica
cattccattccattccgttccattccattccattccactccactccattgcattccactccttaccactctaatccactccactcttctccactccactacccagaagcattctgagaaagttctttatgaggtgtgcagtcaattcccagatttgaacctatctcttgaatgagcagtttagaatctctctttttgcagaatctgcaagtgtatatttggaacgttttgagacctaatgtgggaaagcaaacatctacatctaa

SEQ ID NO: 4399 - DNA, 253 bp, Protomyxzoa rheumatica
aaaggaaatatcttcaaatagaaactacacagaagcattcagagaaccttctttctgatgagtgcattcatcacagagttgaacctttgttttgatttagtagttttgagacaatcattccgtagaatctggaagtgaatatttgtagggatttgagttgtgttttggagaaggagatatcttcatataaaaactgtacagaagatttctgataaacacctttgtgagttgtgcactgaagtcacagtgttga

SEQ ID NO: 4400 - DNA, 358 bp, Protomyxzoa rheumatica
agttgagcacacacatcccaaacaagtttctgagaatccttctgtctacattttatgggaagatatttccttcttcaccataggactcaaagcgctccaaatgtacacttccggatactaaaaaaagaatgtttcaaacctgctctgtgaaagggaatgttcaaatctgtgacttgaatgccaacctcataaagaagtttctgaggatgcttcttctttttatagagagatattcccgtttccaaagaaatcctcaaagccatccaattatacacttgcagattccacaaaaagcgtgtttcaaaacaggtctaccataaggaaggttcacctctgttagtttcgtacacacatcagg

SEQ ID NO: 4401 - DNA, 141 bp, Protomyxzoa rheumatica
aatagaatagaatggaaacatcaaatggaatagaatggaatcatcataaaaaaaaaatcgaggggaattatcgaatggaatcaaacggaatcatggaatgaaatagaatggaataaccatcgaataaaatcgaatggaatc

SEQ ID NO: 4402 - DNA, 122 bp, Protomyxzoa rheumatica
gaaagctatctgagaaaaccactttgtgatgtgtgcattcatcttgcacagtttatactttcttatcattcagccatttggaaacacagtttttgtagaatctgagaagggatattttggag

SEQ ID NO: 4403 - DNA, 196 bp, Protomyxzoa rheumatica
aatgtaatcataatcgaatggaatggaattttatcattgaatggactcgagtggattcatcattgagtggaatggaacggaatcatcatcgaatggacccgagtggaataatcatcgcatggaattgaatggaatcatcatcaaaaggatttgaattaaatcttcgaatggaatcaaatggaaacattatggaatg

SEQ ID NO: 4404 - DNA, 174 bp, Protomyxzoa rheumatica
acagcaggagtgttctggagtcctatgtgtggtacaaatatttcgtccctcgtagcagcgtctggaatcatatgtgaaggacaaacattcagacccacgtggctgtgttctggaatcgtacaagaaggacaaagactcagaacacaacagcagtgttctggaatcctaagtgag

SEQ ID NO: 4405 - DNA, 158 bp, Protomyxzoa rheumatica
ctcctgaataagaaaaaaaagatttaaatgtgtgagaagaatccacacatcacaaagcagttgcacaaacagctcctttctagttttcatctagggatatttgctttttcacctttggcatcgaagtgctcccaaatgtcctttcacagattctacaa

SEQ ID NO: 4406 - DNA, 128 bp, Protomyxzoa rheumatica
gattcattgcagagagttaaacatttctttggattcagctgttttgaaatactgtatttgtagaatctgcaaagggacctgtaggcctatggtgaaaaaggaaatatccccacataaaaactagaaaa

SEQ ID NO: 4407 - DNA, 187 bp, Protomyxzoa rheumatica
atgcctgaggaaactgatgatctcattcctttggggctataaaaaggccttcgtgcaaggccagtaaaactcaggaatcaatattctatgagggcctgagtgttagaaagtgaggcgctgtttgtttcaggtttgcctccaaaattagataaattaacgtaatgaattctctcaactcatttacata

SEQ ID NO: 4408 - DNA, 162 bp, Protomyxzoa rheumatica
cattcgatgattccattcgattccattcgatgatgattcctttcatctcctttcgatgattccattccattcaactccatgaagattccattcgacttcattcaatgattcaatttgattccactcgatgatgactccattggagtccattcaatgattcta

SEQ ID NO: 4409 - DNA, 179 bp, Protomyxzoa rheumatica
cagaagcattctgagaaactttttgtgatgtgcgcattcaactcacagagttgaacctatattttgatagaacattttttaatctctctttttgtagaagcagcatgtggatatttggagacctttgaggcgtatggtggaaaaggaaatatcttcaaataaaaactaaacagaagcat

SEQ ID NO: 4410 - DNA, 171 bp, Protomyxzoa rheumatica
agaatggaatggactcaaaaggaatggaataaaatggaatgcaatcaaatagaatggaatggaatggaatgcaatggattgaaatgacatggactcgatggaatggactagaatggagtggaatgtactcacattaatggactggaatggaatggactcaaatggaatgga

SEQ ID NO: 4411 - DNA, 133 bp, Protomyxzoa rheumatica
gtggggacccggcctcgacctcccaaaatcatacaccgagtggcgaagcctagcaaggaccgtctgtctagattcctctctgcctctctaagcaggcgcttctcactttcgtggaaggggcagggcccccccc

SEQ ID NO: 4412 - DNA, 284 bp, Protomyxzoa rheumatica
aatgaatggaatggactcgaatggaatttaatggaatggtgccaaatggaatggaatggaaaggaatgtaatttactctaatgcgatggtactgaatggaatttaatataatggaatggaatggaatggactcagatggaatagcatagaatagaatggactctaatgcaattgaattgaatggaatcgaatggaatcgaacggatttcaatgtagtggtgtctgatggattcgaatggaatgcaatggaatggaatggaatgtactcgaatggaatggaatgg

SEQ ID NO: 4413 - DNA, 122 bp, Protomyxzoa rheumatica
agacaagagttacatcacctgggtgaccagtgcagagataagtcataaatcccactgtaggaatagcctacaaatattttacatcacctgagcgatcagtgcagagatatgtcccaatgtcc

SEQ ID NO: 4414 - DNA, 125 bp, Protomyxzoa rheumatica
tgagatgaatgcacacatcacaaggaagattcccagaatgcttctttgcagtttttatgtgaagatatttcgttttccacaataggcctcaaagttctcgaaacattgacttgcacattctacaa

SEQ ID NO: 4415 - DNA, 193 bp, Protomyxzoa rheumatica
cctcacgtagggttacagaacaattctacatgagtctaaatgtttgtccctcacataggattccagaaccgtgctatgaaggactgaatgctttttcttcatataagactacagaacactcctgctgtgttctgaatgtattttattcacatagaagtcccgaacaatgctacaaggttctgaatctttgttc

SEQ ID NO: 4416 - DNA, 412 bp, Protomyxzoa rheumatica
ctggaatcctatgggagggacaatcattcagatcacacctggggtgctctgaaatcctacatgtgaaagaaacattcacacgctagtagcgttgttctggaatcctgtgtgagtaaaatactttcaaaacacagcaggagtgttctggaagcctatatgcgggatataaatgcagtccacagtagcagtgttctggaatcctatgtgaggcaaacactcagtacccaagggcagggatctggaatcctcagtgagggacaaacattctgaccacaacaggagagttctggaaacctatttgagggagaaagcttcagaacccagcagcagtgttctggagtcctatgtgtgggacaatcattcagaaaaccgctagggtgtactagaatcctaagtgtggaacaaagattca

SEQ ID NO: 4417 - DNA, 769 bp, Protomyxzoa rheumatica
gaacggaatggaatggaatggaatggaatggaatggaatgatatggactcgatggaatggactggaatggaatggaatgtactcgcattaatggactggaatggaatggactcaaatggaatggagtcaaatggaatagaatcaaatggaatggaattcaacggaatggaatcacaatgaatggaaaggacgggaatggcctcaaatggaagggaaaagaatggaatggaatggactgaactggaaaggaatggactcgaaatggatggactggaatggaactgtctccaatgaaatagactcgcatggattggaatcgaatggaatagagtcaaatggaatggactcgaatggaatataatagaatagaatggaatcaaaaggaatggaataaagtggaatggaacgaattgaaaggacttgaatggaacggtctcgaatagaatggaatcgaatggaatggaaaggaatggaatggcatggactcgaatggcagggaaaggcaaggattggaatcaaacggaatggaatcgaatggaatagaatcagatggaatgaagtgcaatggaacggaattaattcgaatttagtggactggaatggaatggaatcacgtagaatggaatggaaggaatggactcaaatataatagacttgaatggaatggactcgaacggaatggactcgaacggaatggaatggaatggaatggaatcgaatataatagaatgaaatggcacggactcgaagggaatggactcaaatggaa

SEQ ID NO: 4418 - DNA, 129 bp, Protomyxzoa rheumatica
taattcctttcctaccgttggcctcaaatcgcttgaaatctccacctgcaaatttaacaaaaagagtgtttcacatcttctccgtctaaaggatggttcacctctgtgagttgaatacatgcaacacaa

SEQ ID NO: 4419 - DNA, 128 bp, Protomyxzoa rheumatica
ctgaatgtttgtccctcacacaggattccagaacactgctactgggttctgaattttgtccctcaaacagaattccagatcactgctacgagggtctgaatgattgtcccttacataggattccataa

SEQ ID NO: 4420 - DNA, 281 bp, Protomyxzoa rheumatica
gactgagtggttttgaaacactgtttttgtggaatctgctagtggatatttggagtgctctgtggcttactgtggaaaagcaaatatcttcagaaaaaaaccacacagaggcattctgagtaacttcttcgtgatgagtgcattcatctcacaaagttgaacctttcttttgactgagcagatttgagtctctctttttgtagaatctgcaattggatatttgatgctctttaggaaaaggagttatctttaaatataaactacccagaagcattctgaga

SEQ ID NO: 4421 - DNA, 212 bp, Protomyxzoa rheumatica
agaagttttctggaatcctatgtgagggacaaacattcagacccctgcagcagtgttctggcatcgatgtaagggacaatcattcagacccacacagcactgttctggaattctgcttcagggccaacattcagaccacaaaaggagtgttctggaatcacctgtgaggaacaaactttcagaaccccgtagcagggttctggaatcctatg

SEQ ID NO: 4422 - DNA, 125 bp, Protomyxzoa rheumatica
tcaagcttttacactatgcttcttttgtaagtataagttactacttattttatttttattgttttgctagaatatgtgagcataggttgttagaagcagccaggccacatcacaactgctttgct

SEQ ID NO: 4423 - DNA, 265 bp, Protomyxzoa rheumatica
aacttccagagacctccccaggagcatattccagtgctatgtcttctctacagcctgtagaatcataagccacttaaacctactttgtaaaaaataaattatccagtcccactctcatagtgatgcaaaaatagcttaagacagaaaattggcaccaaggaatggaaaatggttataagaataccccaaaatgtggaatcagctttgtaattggataaacaggcagaagttggaagagtctgtaggattcagaagacagaaaaat

SEQ ID NO: 4424 - DNA, 289 bp, Protomyxzoa rheumatica
aagtaactgtcctagatcaacacgctcattggggccttaggtagaaacaagatgggaagagatacctttggggttttagacccagaagctgtcagaggctagcaaagcttatactctttgagaagcagctgttgacctgctactgggctttacaggaaacagaacacctttgtcttaatcatgatgtttttatgaggccccaaattcctaatatgacttgggtcatgaactccctcaaacctcattggatagggtacactcaagaaagtaaatggaaatggcacataca

SEQ ID NO: 4425 - DNA, 137 bp, Protomyxzoa rheumatica
tggaatgggcttgaatggaatggaatcaaatggaaaggagtctaatagaatggaatcgattggaaaggaatcaaatgaaatggtattgaatggcatcgaatgaaattgaatggaatgcgttgaagttgagtggattg

SEQ ID NO: 4426 - DNA, 124 bp, Protomyxzoa rheumatica
taactctgcgagatgaatacacacgtcacatagcagtccctcagcaaactaccatctagtttgaatcctgggatattccctttttcaccattggcctaaatgaggtcccaaatgtccatttgga

SEQ ID NO: 4427 - DNA, 178 bp, Protomyxzoa rheumatica
aaggaaatatcttcacataaaaactatgcagaagcattctcagaaacttccatgtgatgtctgcattcaactcaaagtgttcaaactttcttttgatagatcagtttggaaacactcttttataagaatatgcaagtggatatttgcagcgctttgaggcctacggtggaaaaggaaa

SEQ ID NO: 4428 - DNA, 214 bp, Protomyxzoa rheumatica
aaaaagaaacatcttcacataaaaactagacagcagcattctgacaaaaaacattgtgatgtgtgcattcatctcacagagtagaaacttactttcattgagcagtttttaaacactctttttctagaatctgcaagtggacttttggagccctttgaggcctatattggaaaagaaaatatcttcacataaacactagacagaagcattctga

SEQ ID NO: 4429 - DNA, 236 bp, Protomyxzoa rheumatica
ttatgtgaagatatttccttttccatcataggcctcaaagagctccaaatgtccacttacagattgtacataaagagtgtttcaaagctgctcaatcaaaagaaaggttctattctgtgagatgaatgcagacttcacacagaagattgtcagaatgattctgtctactttttatatgacgatatttccttttccacgattggactccagcgctcaaaatgtccacttgcagattc

SEQ ID NO: 4430 - DNA, 146 bp, Protomyxzoa rheumatica
ctgctctatcaaaagataaattcagttctgtgagttcaatgcacatatcgcaaagaagtttctaagagtgcttcagtgtagtttttatttgaagatatttccttttctaaaataggccacaaagagcttcaaataaccacttggag

SEQ ID NO: 4431 - DNA, 122 bp, Protomyxzoa rheumatica
caagataaatgcatacatcacaaaatgtcttctcagatagtttccttgtagtttttgtggtgggatatacacttttttgccattggcctcaaagatttcacaaatgtccattcacagaatgg

SEQ ID NO: 4432 - DNA, 132 bp, Protomyxzoa rheumatica
tcagaaagaagtttctcagattgcgtctgtcgagattttatgtgaagatatatcattttctaccataggtcacaaagcggaacaaatgtccacttgccgattctacaaaaaaaagtgttttcaaatgctcaa

SEQ ID NO: 4433 - DNA, 164 bp, Protomyxzoa rheumatica
caattgcagattctacaaaaagagtgtgttaaaactgctcaatcaaaagaaagtttcaacacagggagttgaatgcacacatcacaaagaagttactcagaatgcttgtgtctgatttttatgtgaagatattaccttttccacaaaaggcctcaaagtgctcc

SEQ ID NO: 4434 - DNA, 209 bp, Protomyxzoa rheumatica
tagacagaagctgtatttggaaatggtttttaatgtgtggattcaactcacagagttaaaactgttttgattcagcatggtggaaactctctttttggagaatctgcaaagcgtcatttgagagcccattgaggcctgtgggaaaaaaatgaatatgccctgataaaaataagaaagaagatatctgtgaaactgccttgtgatgtgtg

SEQ ID NO: 4435 - DNA, 325 bp, Protomyxzoa rheumatica
actccactccactccattccactccagtccactccactccactcccttccactccactccactctgctccaacccattccacgcctatctttcgacaggatctgcctctgtcacacaggctgtagcacagtagtacaatctcagcacctgttacattcctttccattccattccattccgttccaatgaattccactccactccactgcactccactccattccgtttcactctactccactccactccatttcattccatcacattccatcccactcctttccactccactttactctattccattacattgcactccattcca

SEQ ID NO: 4436 - DNA, 335 bp, Protomyxzoa rheumatica
gactctgttcaatcccattggatgattcccttcgaatccatttcgtgatccttccatttgattcaatttagtgattccattcgattctattcaatgattgctccaatcgaatcctatagatgatgattccatacgattccatttgattatgattatatttgattccatttgaagatgattccattcgagtccaatcgatgattccattcgattccattaagtgatgattccactcgagtgcattccatgattccattcgactccattcgattattcccttagattccattcattgatgattctattttattccattcgatgattccatttgtttc

SEQ ID NO: 4437 - DNA, 674 bp, Protomyxzoa rheumatica
ttggcctcatgtatgtcttctttcgaaaactgtccattgtctttgcccactttttaatggggttgtttttcttttgtaaatttaagttccttatagatgctagatattagacctttgttagatggatagtttacaaatatttttttccactccataggttttctgtttactctgttaatagttttttttctgctatgcaaaatctctttactttaattaaatcctacttgttaatttttgcttttcttgctgttgcttttggtctttctatcatgaaatctttgcccattcctatatccaggatggtattgcctggattgtctttcatggtttttatacataaagattttatatttaagtcttcaatcagtcttgagttgattttctttttgtatatgatgtaaataaagggtccagcttcaatctgccacatattgccagccaattattccagcaccacttattgaataaataatctttttctcactgcttgtttttgtcagccttgtcaattatcacatggcatagatgtgcagccttgtttctgggctctctattctgctccatttgtctatgtgtctgtttttgtatcagtgttatgctgttttcgttactatagccctgtagtgtaatttgaagccaggcaacctgatgcctgcagctttgttcttttt

SEQ ID NO: 4438 - DNA, 178 bp, Protomyxzoa rheumatica
tcggataaaaaatagaaataagaattttgagaaactgttagtgaagtatgcattcatctcactgagctaaacttttattttgactgagaagtttgcaaacaccgttcttgtacaatctgggttactatgttaagtagcccaaaaaggcctatggtgaacaaggaaatattttcagata

SEQ ID NO: 4439 - DNA, 713 bp, Protomyxzoa rheumatica
tttaaatttaaaatttttacctaattattttgataatataacttattttgatcttacttttaaacttttcctctaatatatttaaacattataactacttatattatttctacagtatatatacaattttgggatttattaagatgtaatggtacagctgtgtttttcttataattttgtttcttaataactttgatcttgatgacttttactttgtatattttaaaaagaatagtagacttcattttattataaatgactgacctcaattgatggggccattgaagattctgggtcgaggtattttattccagtgaaaagttatctgtaatgttaataatgcaccctttacagacacctgaaaatgattaagtctatatatttacctaaattgtcctgagtaaaacacatagtgtacatataaaccagaaactcatatgatgattggtgttaattcccaaatcaaccaaagaggagaaataccacctccactaactaacctatttttctaaacttttgaaaatgtaaggattctagctttagatagcatagtcagatccaagtactcctgcatctatgctgctgtgacattatattcaccaatcagacatgttaaattctaacaaactgtgcttccattattagcaattcccacaggtagcatcaacttccagcctaatttttctcctacagctgtgcttctttatcctttc

SEQ ID NO: 4440 - DNA, 197 bp, Protomyxzoa rheumatica
gtgtgcattcatctcacagagttaaatcttacttttgatggagcagtttgttaaccttggttttatatatactgcaaagggatatttcagagcacattgaggcctaaggtgaaaatggaaatatctttagacaaaaactagaaagaaggtttgtgagaaactgctttgtggtctgtgcattcatctcacagagttaa

SEQ ID NO: 4441 - DNA, 125 bp, Protomyxzoa rheumatica
ctttgtgccatcaggaggtgggatcactggctgtacccacaacgtacagaaacgccatgttctgactcatgatttgggctcattctcttgggactcaatttatcaaaacctccctcaaaaactca

SEQ ID NO: 4442 - DNA, 163 bp, Protomyxzoa rheumatica
atactagaaagaagctatctataaacttgttttgtgatgtgtggattcattgcacaagattaaacctttcttttatttcagccagttggaaacactcattttggagaatctgtgaagggacttatggtaacccattgaggactgttgggaaaaacagaatatc

SEQ ID NO: 4443 - DNA, 506 bp, Protomyxzoa rheumatica
atgtgaagatatttccttttccaccataggctacaaggatttcctaatattcacttgcagattctacaaaaagagagtctcaaaactggtcaatcgaaagataggttcaaccctgtgagttgaatgcacacaccacaaagaagcttgtcacaatagttttgtgtagtttttatgtgaaggtatttccttttccaccgtagtcttcaaagtgctccaagtattaaattgcagattctacaaaaagagtgtttccaaactgctcaaactaaaggaaggttcaactctgtcagatgaatgcacacatcgcatagaagtttctcagaatgtttctgtatagtttttatgtggagatatttccttttccacaataggccttaaagcgctccaaatatccaactgcagattctacaaaaaaaaagtgtctcaaaactgctgaatcaacagaaaatttcaaatctgtgagatgaatgcacacgtcacaaagaagtttctcagaatgtttctgt

SEQ ID NO: 4444 - DNA, 180 bp, Protomyxzoa rheumatica
tggtcggtctcacaaagctccctctccaaagtagctaattgttaaatcaagttgggcataaagctgcctctgtacatggtgaactgtaacatgactgaatgtgaacacaaactataaaccaagagtatacattcttgtgccaaggagccaagtcttggctgaaggttcctgcagccagtc

SEQ ID NO: 4445 - DNA, 248 bp, Protomyxzoa rheumatica
ccacactcagttctctctcctggatgctctgtcctcccttggccactcaatactacagtatttaagtcctattcgtcatagtctttgttggggtatgatgatgagtaagagccatagttcacagtgaagtggcctgattcaaattagggttagggtctggttctgggttagggcttggggtgttaaaataaaagccttagacaagttcaatttcacagagtttagttgggcagaaaaaggttcataaa

SEQ ID NO: 4446 - DNA, 226 bp, Protomyxzoa rheumatica
actccactccactacactccattgaaatccattcctccccattcctttccactccattccattccactgcactccatttcaatgcataccattcgattacagtcgtttccattcgattccattctaatcgattccaaaccttttgattccactccattcgattagattccattccattcgatttcattcctttcgatttgattttattccattcgggtccattcct

SEQ ID NO: 4447 - DNA, 353 bp, Protomyxzoa rheumatica
cagtgaatgaatgcactcccagtccattcgagagggaagagccctcacctcatcactcccctgaggcctcaccttctaatactatcaccttggtgataagatttcaacataggaattagaggggaatacatacatccagactattgcagatgggattatgtaatactttgttcctgtttggcttatttcttagcacaatatctttctggtatgtgcatgttttggcaaatggcaagattttcttcctttttaaggctgagtaatatttcattgcatgtatagaccacattttctttatacattcattattattgagagttcttattacaaatggggaagtggtttttaatatt

SEQ ID NO: 4448 - DNA, 128 bp, Protomyxzoa rheumatica
taccagaggcctcaaatggcgtcaaatatccacttggaaattctacaaatagagagtctcaaaatttctctatcaaaaggaatgttcaactctgtgagttgatagcacacatcacaaagtattttctg

SEQ ID NO: 4449 - DNA, 139 bp, Protomyxzoa rheumatica
acaatagttacatcacctgagtgatcagtgcagagatttttcacaatgcccctttaggctgagcttcgaccagtgttacaccacctggtttatcagtgcaaagatacgtcacaatgtcccctgtaggcagagcagagag

SEQ ID NO: 4450 - DNA, 145 bp, Protomyxzoa rheumatica
ttgaatggaatcatcaaatggactcgaatggaatcattggcaaatggaacctaatggaatcttcaaatggacttgaatggaatcatcatcaaatggtattgaacggaatctacgaatggactcgattgaaatcttcatagaatgc

SEQ ID NO: 4451 - DNA, 205 bp, Protomyxzoa rheumatica
agccatgaagaaattaaaagggaaatgtaaaattttgttcaggcaaacaaaagtgaaaatatgacataccaaaacttgtgggatataggaaaggcagttctaaagggaagtttatagcaatcaactcctacacaaaaaaaagaaggacactaaataaacaacctaacattgcacctcaaggaatcagaaaaacaagaacaaacta

SEQ ID NO: 4452 - DNA, 127 bp, Protomyxzoa rheumatica
ttcagattctacaaaaagaaagattcaaaactgctcaaacaaaccctaggttaaactctgtgtgttgaattcacaattcacgaagaaatttatcagaatgctactgtgtagtttttatttgaagatt

SEQ ID NO: 4453 - DNA, 129 bp, Protomyxzoa rheumatica
atttgtttccatttggagataattatattccattcgatgattctattcagttccattcgatgaggactctatacaattccatttgatgacgactccatttgattccattccataatgattcaattcgtg

SEQ ID NO: 4454 - DNA, 284 bp, Protomyxzoa rheumatica
ctactccactccaatccactccactccactccactccactccatgtcatttccatccatcccattccattccactccattccaccctactcgactcaaattcactccaccccactccactacaagccattccattccatcccatttcattccactccattccactcgactccactccactccattcaattccatcccattctattccattcctttctttcgacgggatctcactgtgtcaaaaaacgctggaacacagtggaacaatctcagctcacatttcat

SEQ ID NO: 4455 - DNA, 239 bp, Protomyxzoa rheumatica
aactatatggaatggaatgcaatgggatggactcaagaggaaaggaatggaattgactcaaatggacttgaatggagtggacacaaatggcatggaatgtaatggaatatactcaaatggaatggaatggaaaggactccaatggaatggaacagaatggaatggattcgaatggaatggaaaggagtggactcaaatgaaatgggttggaatgtaatggactcgaatggaatggaatg

SEQ ID NO: 4456 - DNA, 477 bp, Protomyxzoa rheumatica
atgagggtttcaaacctgaactttccaaggaaggtgcaattctgggatttgaatgcaaacatcacaaagaaaattcagagactgcttctgtttagttagctgaaattatcccgttaccaacaaattcctcagacaggtccaaatatccacttgcagattctacagaaagtgtgtttggaaactgcgtcatctaaaggaatgttcagctctgttagttcaatccaatgatcactaagaattctctgtgaatgcttccgtttggtttttagatgaagttatttcctttactacagtaggcctcaaagcagtccaaatttccaatcgcagattctacaaaaagattgtttacaacctgctctatctataggaatgttcaactctgtgagtcgaatgcaatcatcacaaagaagtttctgagaatgcttccataaagtttttatgtgaagattttccttttccaccacaggcctcaaagcc

SEQ ID NO: 4457 - DNA, 195 bp, Protomyxzoa rheumatica
gacagagcaagaccgtgtttcaaaaaaaatttttttgtattttaattaggaatcaaataagataattaaatgtaaacttacacttaatttactttttaagcattttaagaattggtattctaattttgtgtcggtacattttaagaatcaataaaattatttttaaaatcaaagcaattttaaagcttttacttc

SEQ ID NO: 4458 - DNA, 222 bp, Protomyxzoa rheumatica
aacattcataccacaggaggaatgttctggaatcctatgtgagagacagacattcagaccctggtagcagtgttctggaatcctatgtgaaggccaaacactcagaaaccagcagcagtgttgtggaatcctatgcgagcgacaaacattcagatgccagaagcattgttctggaatcctatatgaggggcaaacattcagacctaagcaggagtgttcttt

SEQ ID NO: 4459 - DNA, 142 bp, Protomyxzoa rheumatica
tgcccagattgctagcttacagacacattccctccttcaacaggtgttaaccctagaggactagaacctaataagttatggcaaacagatgtacacacatccttgaattaggaaaaataagatatgtacatgtatcagttga

SEQ ID NO: 4460 - DNA, 133 bp, Protomyxzoa rheumatica
cagcctgggtgatggagcacgaccctgactccaaataataataataattacaaaaaggaaagacctagaacaccaggttagggttaagtattctaaaattcagctgacttactctgttcactataaagcaggt

SEQ ID NO: 4461 - DNA, 349 bp, Protomyxzoa rheumatica
aagtttctcagaatgctcctgtgtagtttttttgttaagatattttctttttctctatactctgcaaagggctcttaatatccgcttgcagattctacaaaaaggaggtttccaaactgctctaacaaaagataggttcaactctttgagttgaatgctcacatcacaaagaagtttctcagattgattcactgtagtttttatgtgaagatatttcctcttccaacataggcatcaaagggctccaaatatccacttacagattctacaaaaagagagttccaaaacgctctataaaaagataggttgaactctgtgagttgaatgcacacatcacaaagaagtttct

SEQ ID NO: 4462 - DNA, 122 bp, Protomyxzoa rheumatica
gcattcatctcaaaaatttgaacgtttcttttgattgagcacttttgaaacactctttgagtagaatctgcaatgggatatttggagcgctgtgaggcctatggtggaaaaggaaatatctt

SEQ ID NO: 4463 - DNA, 215 bp, Protomyxzoa rheumatica
atcacataggattccagaacactgctgctgggctcttatgtttgtccctcacttaggataccagaacactcctactattgtctgaaagtttgtccttcacatagagtaccagaacactgctacgatggtctgaatgttcgtaccacacttgggattccagaacactcctgctggagtctaaatgtttgtccctcacataggattccagaacactg

SEQ ID NO: 4464 - DNA, 147 bp, Protomyxzoa rheumatica
cagaagcattctcagaaacttctttgcgatatttggtttcaactcacagagttgaatattccctttcatatagtagttttgaaacactcttttcgtagaatttgcaagtgcatacttcgaccactttgaggccttcattggaaacgg

SEQ ID NO: 4465 - DNA, 161 bp, Protomyxzoa rheumatica
cattccattcgagacctttctatttgaatctattcaattcgagtccattccattccgtttgattctatcccatgccattccatactattcgactccattccattccattgcgttgcattccattgcattccaatccattcgaatacattccattccattcc

SEQ ID NO: 4466 - DNA, 310 bp, Protomyxzoa rheumatica
agaatggaatggaatagaatagaacagactcgaatggaatggattgcaaagtaattgattcgaatgtaatagaattgaattgaatgtattcaaatggaacagaatggaatgcaatggaatggaatagaatggaatgcaaaggaatggaatggagtggaatagactggaatggaatggaaaggaatggaatccaatggaatggtacctaatggaatggattgtaatggtatggactcgaacggaatggactggaccaaaacggaaacgaatggattggaatcgaacggaatggagtggaatcaaatggaat

SEQ ID NO: 4467 - DNA, 131 bp, Protomyxzoa rheumatica
aactccactcttctgttctccattccgttccattctgtcgcattccattcctttccattgtattccatcccactctaatccatgccattccactcctttcctctcctcttcactccactccaatccactcc

SEQ ID NO: 4468 - DNA, 688 bp, Protomyxzoa rheumatica
tccagaacactgctaagaggatccgaatgtttgtccctcatataggattccagaacaccgcaactaggttctgaatgatttaccctcacataggattccagatcactgctaagaggatccgaatgtttgtccctcataggattccagaacactgctactaggatctgaatatttgttactcacaggggattgcagaacactccagctgtggtctgaatgtttgtccctcaaataggattccagaacactgctatgagtgtctgaatgtttttccatcacacagaattacaggacactgctgttaccgtctacatgtatgtctgtcacataggatttaagaacattgctgccggtttctgagtgtttcaccctcacatagaattccagatcactgagacgaatttctgaatgtatgtccgtaacttaggattccagaacactcactctgttgttggaatgtttgtccctcacatacgattccagaacactgctgttgtagtctgaatgtttctccctcacataggattcgagaacacagctacgattgtctcaatgtttgtccctcacataggattccagaaaaatgctacaagggtctgaatatttgtcacttacataggattccagaacactgctacaagtgtctgtatgtttgcccctcacataggattccagaacactgctacga

SEQ ID NO: 4469 - DNA, 362 bp, Protomyxzoa rheumatica
cagtgttctggaatcctatgtgagggacaaacattcagaaaatcgtagccatgttctggaatctcaagaaagggaaataaattcagaccccagcagcagtgttttgtaatcctatgtgagggagaaacattgaaccaagatcgggagtgttctgcaatccctggttatggacaaatattcagaacctcgtctcagtgctctggaattctatgtgaggtagaaacagtgagaacccagcagcagtattctggaatcctatgtgagggaaaatcattcagaccccagcaggagtgttctggaatcctatgggagggacaatcattcagacaatcgtagcagtgttctggaatcctatgtgaggg

SEQ ID NO: 4470 - DNA, 184 bp, Protomyxzoa rheumatica
atggaatcatcattgaatagaattgaaaggaatcatcatcgaatggaatcaaatggaattatcatctaatggaaacgaacggaatcatcaacgaattcaatcaaatggagaaatctaatggaatcctttggaatcatcatcgaattgaaccgaacacacacatcatcaaatggaatctaatgga

SEQ ID NO: 4471 - DNA, 210 bp, Protomyxzoa rheumatica
ctcatagcagtgttctggaatcatctctgagggacaaacactcaaaatcaagcagcagtgttctggaatcctatctgagggacaaacatgcagaccacagctggggtgttctggaatcctacgggtaggacaagcatccagaccctcgtcgcattgttctggagtcctatgtgaggaaaatacattgagaacacggcaggagtgttttga

SEQ ID NO: 4472 - DNA, 170 bp, Protomyxzoa rheumatica
cttgtctgaatggttctcccacagatagaattccaggacagtgctgctgggttctgagtgtttgaccctcacttatgattccagaacacagctacgtgggtctaaatgtttgtccctcatacaggattccagaaaactgctacgagggtctgaatgttgtccatcacata

SEQ ID NO: 4473 - DNA, 145 bp, Protomyxzoa rheumatica
caaagaaatgttcaaccctgtgagtttaatgcacacatcagaaagcagtttctgagaatgattccctctagtttttatatgaagatatccttttctaccattggtctcaaggctcttggaatctccacctgaaaattccgcaaaa

SEQ ID NO: 4474 - DNA, 122 bp, Protomyxzoa rheumatica
acaaactttttgtggaatttgcaattgtatatttatagccttttgaggcctatggtagaaaaggaagtaccttcacaaaaacactagacggaagcattgtcagaaactactttgtcatattt

SEQ ID NO: 4475 - DNA, 141 bp, Protomyxzoa rheumatica
ctatgtttccttttgataccattcaatgatgattccattcgattccatgtgatgaatgattccataagattccatgcaatgatgattccattagtgtccattagatgattccattcgattgcatgtgatgatgactgaatt

SEQ ID NO: 4476 - DNA, 141 bp, Protomyxzoa rheumatica
gaatcatcatcgaatggattagaacggaatcaaccactggaatcgaatttaataatcatcaaatggaatcattgaatggaatcatatggaatcatcgaatggaatcaaatggtgtcttcatcgaatggaatcatctaatgg

SEQ ID NO: 4477 - DNA, 138 bp, Protomyxzoa rheumatica
gcttcaaaatgtgcctttgcagtttctccaaaaagagtgtttccaacctgccaaatcaaaagaaagatttaacaatacaagatggattcgcacatcacagagggttttcacagacagcttttttgtagtttatattag

SEQ ID NO: 4478 - DNA, 216 bp, Protomyxzoa rheumatica
tgagggaaaatctttcataccctcatagcagtgttctggaatcctatttgagggaaaaaaaactcagaatctaggagcagtgttctggaatcctatgtgagggaaaaacattcagtccgcagcagcagtcttctggaatgctatgtgagggacaaacattcagatcgtagcagaattgttctggaatcctatgtgagggacagtcagaccacagca

SEQ ID NO: 4479 - DNA, 346 bp, Protomyxzoa rheumatica
ttctgaatatttgtccctcacataagtctccataacactcctgctgtggttaggatgtttgtccctcagatagcattcaggaacactgctgctggagtctgaatgtttgtctctaacatacaattccacagcactactgctctggtctgaaggtttgtccttcacatatgatttcagaacagtggtgctggattctgagcgtttgtcattcacataggattccagaacactgctaagagggtctgaatatttgtcccttacttaggattccagaatactgcttctgggttctgagtgtttgtcccacacataggattccagaacactgctacaagggtctgaatgt

SEQ ID NO: 4480 - DNA, 124 bp, Protomyxzoa rheumatica
tgatgtgagcattcacctcacagatttaaactttctttaccttaagcaatttggaaacactgtttttgtagaatttgttaaggaatatttcagagcgcattgaggcctatgtttaaaaggaaaa

SEQ ID NO: 4481 - DNA, 138 bp, Protomyxzoa rheumatica
agatatttcgtttttcttcattgtcctcaaagggctccaaatgtccacttgcagattcttcaaaaagagtctttcaaaactgctctatcaaaagaaaagttaaactctatgtgttgaatgcatacatcacaaagaagt

SEQ ID NO: 4482 - DNA, 518 bp, Protomyxzoa rheumatica
tgacagacaaacattcagaccccagcagcagtgttctggagttttatgtgagggaaaaacgttcagacaatcatagcagaattctggaatcctatgtgagggacaaacattcagacctcagctgctgcgttctggaatcctatgtgagggacaaacattcatacaacagtgggagtgttctggaatcctatgttacaggcaaatattcagaccctcgtccgagtgttctggaattctatgtgagggagaaacattcagaacccaccagcattgttctggaatcctatgtgacggacagacatgcagaccccagcagcattgttctggaatcctatgtgacggtcagacatgtagaccccagcagcattgttctggactcctatgtgagggatgatcattcagaccctcgttgcagtgttttggaattctgtgtgagtgagaaacattcagacccttgtagaagtgttctggagccctgtgtgagggacaaacattcagaccacagcaggagtgttctg

SEQ ID NO: 4483 - DNA, 300 bp, Protomyxzoa rheumatica
aatgtacttgaatggaacagaatggaatagaatggaatttactcaaatggaatcgaattgaatggacacgaatggaaaggaatgaaacggaatggaatggaatggaacggaatggaatggaatggactggaatggaaaggaaaggacttgaatgcagtacaatggagtagaagggaatggactcgaattaaatggaatggaaaggacttgaaagtaatgcaatggattcgaatggaatgtattggaatggaatggactccaatggaatggaatggaatggactcaagtggaatggaatgg

SEQ ID NO: 4484 - DNA, 167 bp, Protomyxzoa rheumatica
tgttctggaatcctaagtgagggacaaacattcagacaaccgtagcagtgttccggaatcctatgtgagggacattcattcagacgttcgtagctgcgttgtggaattctgtgtaagagccatatattgagatcctcaaagccgtgttctggaatcctacgtgaggg

SEQ ID NO: 4485 - DNA, 386 bp, Protomyxzoa rheumatica
agaattccagaacactgctacaagggtctgaatgattgaccctcacagaggattccagaacactgcttttgagatctgaatgtttgtcttcacatatgattcaagaacactgctgctggcgtctacatgtatgtccatcacataggattccagaacactcctgttggtttctgagtgtttctctctaacacagaattccagaacactgcgacgaggttctgaaagtctgtctgttacataggattcgacaacactcccgctgttgtttgaatgtttgttcctcacataggattccagaacgctgctggggtctgaatatttgtccctcacataggattccagaacatggctaagattatctgaatgtttgtccctcacatgtgatt

SEQ ID NO: 4486 - DNA, 178 bp, Protomyxzoa rheumatica
gagtctaaaaatttaatacaaaatactgtttcttcagagaaacgttatgatatttaaaaacttttctaaatttgtgggtccttagctccacaaccctgtgctgcttaatcaaaacttggtggtggttggctgggcattgtggcccacacatctgatcccagcactttgagaggccaag

SEQ ID NO: 4487 - DNA, 226 bp, Protomyxzoa rheumatica
acactctttttgtagaatctgcaagtggacgtatggaatgctttgaagcctatggtagaacaggaaatatcttcacataaaatctagacagaggaattctgagagacttctttgtgatgcgtgtactcatcttacagagttaaaccttccttttgaatgagcagatttgaaactgtctttttgtagaatctgcaagtggacattttgagcgccttgaggcctatgg

SEQ ID NO: 4488 - DNA, 132 bp, Protomyxzoa rheumatica
taactcatagattttaacatttcttttgatagagcagtttgaaactctcttttttgtagaatctgcaagtggctattttgactgctttgagtaattcgttggaaacgggaatatcttcacttaaataccaga

SEQ ID NO: 4489 - DNA, 264 bp, Protomyxzoa rheumatica
tcttcacataaatactagacagaagctttctgagaaacatctttgtgatgtgtgctttcatcctacagagttgaacccttctgttgattgatcactttggaaacagtctttggaagaatctacaaatggattttggagagctttgaggcctaggtttaaaaaggaaatatattcacataaaaagtagagggaagcattttgagaaacttctttgtgatgtgtgctttcatttcacagagttgaatcattattttggctgagctt

SEQ ID NO: 4490 - DNA, 236 bp, Protomyxzoa rheumatica
acacttttataatcactgcttatagggaattttgacaactctctgtactgatcaccttggtgatgtaactcttgtctatcctctgcccaaagggggaattgtgaaatttctctgcactgatcaaccaggtgattcaacacttgtctaagatctgcctaaagcggtgttttcacatatccctgaactgatgataaaggtgaggtaactcttgcctaggctttgcctacaagggacat

SEQ ID NO: 4491 - DNA, 189 bp, Protomyxzoa rheumatica
gtgtccattcgatgattccactcgattccattttatgatgatcccattcatgtccattcgatgattccactggattccattcaatgatgattccatacgagtccactagatgattccatttggttccatttgatgatgattccttacgatgccattcaaagattccattagatttcattggatgatgat

SEQ ID NO: 4492 - DNA, 149 bp, Protomyxzoa rheumatica
acaaaacgagtgtttccaaactgctcaatcaaaagagaggtacaactccgtgaggtgaacacacacatcacagagaagtttgtcataattcttctgtgtagttttaaactgaagatatttccttttccaccataggcctcaaaacactc

SEQ ID NO: 4493 - DNA, 249 bp, Protomyxzoa rheumatica
ggaatgtaatggagtggagtggagaggagtggagtggagtgcaatggaatgaaatggaattgaaaagaggggattggagtgcagtggagtggagtggaatggaatggaatggaatggaatggagttgaatggaatggaaaggaatggtgaaatgcattgtgagctaagattttgccactgcactccagtctgggtgacaaagtgagatccaaatgaaataaactaatcgaatggaatgcagtagaatgg

SEQ ID NO: 4494 - DNA, 255 bp, Protomyxzoa rheumatica
ctctgtgagatgaaggcacacatcacaaataacattctcagaatgtttctgggtagtgtttatgtgaagatatttgcttttctaaaataggtcccagagccatccaaatatccactttctgattctcctaaagggtttttccaaactactcaatcaaaagaaaggttcaacactgtgagacgaaaacacacttcacaaagaaatttctcagaatgcttctgtgtcgtttttatgtgaagatattttttttccacc

SEQ ID NO: 4495 - DNA, 256 bp, Protomyxzoa rheumatica
tttatttcaggatatttccttttcctccatagactgcaaagggcttcaaaaatccacttgcagattctacaaaaagcaaaattcaaaactgctcaataaaaagataggttcaactctgtgagttgaatgtacacatcacaaagaattttctgagaatgtttctgtgtagtttttaggtgaagatatttcctttttcaaaacaggcctcaaaagcccccaaatatccacttgcagattctacaaaaagattgtttca

SEQ ID NO: 4496 - DNA, 131 bp, Protomyxzoa rheumatica
attccattcgagtccattcgattattccattctagtccattccataattccatttgagtccattcgatgatgcttttgattccgttcgatgatattccatttgagtccgtttgatgattccattcgagtct

SEQ ID NO: 4497 - DNA, 123 bp, Protomyxzoa rheumatica
atttatttctactttttatctagggatatttatttcttccccacaggcctcttcctgtgcttaaatgtcccttcacagaatctccaaaaaagtgtttccaacctggtgaatcaaagaacggtt

SEQ ID NO: 4498 - DNA, 127 bp, Protomyxzoa rheumatica
tgaaactgctttgtaatgtgtggagtcatctcacagtgttaaatttttcttcttattcagcaggttggaaacactcttattgcagaatctgctaagggacatttgtgagccctttgaggccaataaa

SEQ ID NO: 4499 - DNA, 122 bp, Protomyxzoa rheumatica
tagaaagaagctatctgtgaaactgctatatgatgtgtggattcgcttcacagagttaaagctttcttttcattctgtaggctgaaacactctttttataaaatttgtgaagggacatttgg

SEQ ID NO: 4500 - DNA, 213 bp, Protomyxzoa rheumatica
acaaagaagtttttcagaattcttctgactagtctttatgtgaagatatttccttttccacaatggtcctcaaagccctccaaatgtccacttgcagattctatgaaaggagagtttcgaaactcctcaatcaaaagaaggtttaactctttgaggtgaatgaacacttcactaagaagtttctcagattgcttctgtctagattttatgtga

SEQ ID NO: 4501 - DNA, 220 bp, Protomyxzoa rheumatica
cctcgttgatccacccacctcggcctcccaaattgctaggattacaggcgtgagccaccgctcctggccggtcctgtagctattatttcctgtttttctctcttgttctctttcttagcgtattattgatttttatagtgacatgttttacttcttttctcactactctctctgtgtgtatgtctttgtgtgtgtgtactataggtatttcctttttttt

SEQ ID NO: 4502 - DNA, 186 bp, Protomyxzoa rheumatica
gaaacagtctttttggagaatctgcaaagggatatttgtgtacacttggaggccaatggtgagaaaggaaatatcttcacatgaatactagacagaagctttctgagaacttctgttttatgtgtgcattcctctcaaacagttgaaccattcttttgattgagcagtttggaaacagtctttttg

SEQ ID NO: 4503 - DNA, 133 bp, Protomyxzoa rheumatica
ttgttcaccataggcctcaaactgctcacaaacatccctctacagatactacaaaaagactgttaccaaactgtttaatcaaaagaagggatcaactctgtgttataaatgcacatgtcacaaaggagtttct

SEQ ID NO: 4504 - DNA, 124 bp, Protomyxzoa rheumatica
tgatagagcagttttgaaacactctttttgttcaatttccaagtgcatatttggatgctttggaaccgactgtagaaaaccaaatatcttcatataagagctagacagactcattctcagaaac

SEQ ID NO: 4505 - DNA, 137 bp, Protomyxzoa rheumatica
aaaggagtggaatcgagtggaatggaattgaacggaatggaatcgaactgaatggaatcgaatggaatggactcgaatgtaatggactggggcaaaatggattcgaacctattagaatcgaatggcatggaatggaa

SEQ ID NO: 4506 - DNA, 199 bp, Protomyxzoa rheumatica
ggaatggaatggaatagaatggaacggagtggaaagaacagcatggaatagagtggattgtagtgaagtggaatggaatgtgaaggaatggaaaggaatggaatggaatgtattggagtggaatggagtggagttgactggaatggaatggagtggaatggaatggagagaagtttaatggaaaggagtggagtggaat

SEQ ID NO: 4507 - DNA, 219 bp, Protomyxzoa rheumatica
gaaacgggaatatcttcctataaactctggacagaagcattctcagaaactgccctgtgatgtctgcattcaagtcacagagtagaacattgcctttcatagaggaggtttcaaacactctttttttagtatatggaaggggacgattcggacagtttgaggcccatggtgatataggaaatatcttcccctacaagctagagagaagcattctgtgaa

SEQ ID NO: 4508 - DNA, 231 bp, Protomyxzoa rheumatica
tcgaagagttgaacctttcttttgattgagcatttttgaagcactctttttgtagaatcttcaagtggatatttggagtgtttgtggcctgtggtggaaaaggaaatatattcacataaaaacgagatagaagcattctgagaaacttctttgtgatgtgctcattccactcacagagttgagcttttcttttgattgagcagtttggaaacagtctttttgtagaatctg

SEQ ID NO: 4509 - DNA, 136 bp, Protomyxzoa rheumatica
aatccacacatcacaaagcagtttcatagaaaatttccttctagtttttatctagggatattggccttttccccttagacctcaattctctctcaaatatctttccatagatttcacaaaaacagtgtttcctaac

SEQ ID NO: 4510 - DNA, 179 bp, Protomyxzoa rheumatica
tttttgatgttttgattcatctcacagaattaaacctgtgttttgattcatcagtttgagaatacttttttttttttgtagagtctgtgaagggacatttaggagctcattcaggcatatggtgaaaaagtgaatatccccagataaaatatagaaagaagttatctgtgaaactgctt

SEQ ID NO: 4511 - DNA, 133 bp, Protomyxzoa rheumatica
ctgtaaccaaaaaatatctgagacagctttcaatcaatttagaagcgtattttgccaaggttgataactcatgcccataactcctgataactcaggagacagttctgtgtctttctccaaagatgattttgag

SEQ ID NO: 4512 - DNA, 187 bp, Protomyxzoa rheumatica
tattatatatgttttatattttattatatataaatatttaaaattatatataactgtataatgttatacgtaaatatataatatactacatataaccatatattatgttatataaaattttattacatactttccataatatatcatatggactcctttggaatggtctagtatgcaatgcaatcga

SEQ ID NO: 4513 - DNA, 135 bp, Protomyxzoa rheumatica
cggtatctcattgttttaatatgttaccctaacgttacacaatataatgcattcttttatgagtttatttcctatatggttctcataattggtgaggtatctgttaaggtctttggtctattttattaggtggtt

SEQ ID NO: 4514 - DNA, 434 bp, Protomyxzoa rheumatica
catcacaaacaagtttctgagaatgcttctgtctagttttcatgggaagagatttcctttttcaccatgggactcagagccttcggaatgtccacttccagatactagaaaaagactgtttcaaaacctgctctgtaaaagggaatgctcaactctgtgagttgaatgcaaacatcactacgaagtttccgagaatgtttctgcttttcatatggagataatcccttttccaacgaaatcctcagagcaatccaaatatccacttacagatcctacaacaagagtgtttcaaaactactctatcaaaagaaaggttcaactctgttagttgtgtacacacatcaaaaaacaagtttcggagaatgcttctgtctactttttgtggaagagatagcctttttcaccgtaggcctcaaagcgctccaaatgtccac

SEQ ID NO: 4515 - DNA, 533 bp, Protomyxzoa rheumatica
cacagatgcaggtcagtgaggggtatgtggtactccacagagtgcctcagggactaggctgttgctagctctgacatcttacagctgctccatctagagcacattgtaggttgcacagctgtaagtggaccacataagagtagatttccccctgtaacttgatcaggagctaggcagacttaggggtaagctgatgcaactgagctcggttcacatgccatgaggtgaccccttttccagctcccagggtatctcctgggtccacagagaattttcttccttctgcctccttgctggtttggacgttgttatttaacctggctcagtcctgccttccaaatagctttccttaaaagttcccataatatttcccacaatcagaggtcaaagcagtcaataacggaaatcagtaccaactttgaaatagatgaagatgagttagtttccactgagacaagtttccagtggggttcttggggcctcagacttggtggtagtggggtgccagttgtgtggaatttgaagctaatctg

SEQ ID NO: 4516 - DNA, 225 bp, Protomyxzoa rheumatica
cttatgtgaactcagagtaagaacctgctcgtgaccatgaggacagcaccaagcatccatgagggatatgtccccatgaacaaaataccttccagtgggcccacctccaacattggaggtcacatttcaacgtgagatttggaagggagaaaacatccaaagcatatcagtggggtaacacaagtcatagtaacctggactaaatgaaacaaaaatcagaaaacc

SEQ ID NO: 4517 - DNA, 202 bp, Protomyxzoa rheumatica
ggaatgctatgtgagggacaaacattcagacactcgcagcaggcttctggaatcctacgtgagggacaaatatttagacaatggcagcagtgttctggaatcctatgtgggggacaaacattcagagccttgtagtgttgtggaatcctatgtgagggacagacatttagaccacagcagcagtgttctggaatcccatgtg

SEQ ID NO: 4518 - DNA, 320 bp, Protomyxzoa rheumatica
gagactacctcacacctttctcccaggttgacttctttgatcaccaccaccgagaccatctcacacagtcctcccagcttcacttctttgaccaacagcaccgagaccacctcacacagtcctcccagcttcacttcttcaagcaccaccactgagaccccttcacacagtactcccggcttctcttcttcaattgccacctccaagaccacctcaaccagtcctctcagattcacctttgtgatcggcaccaccaagaccacttcatacagtactcccaggttcacttccgtgattgccagcaccaagaccacctcaca

SEQ ID NO: 4519 - DNA, 386 bp, Protomyxzoa rheumatica
aagctgggaggactgtgtgaggtgatctcggtggtagcgatcgaagaagtgaagccgggagtattctgtgacgtggtctcagtggtggcaatcgaagaagtgaagctggcagtactgtgtgaggttgtctcggtggtggccatcgaagaacttaagccgaaggtactgtgtgagctggtcccggtggtggtgatcagagaagtcaaactgggagtactctgtgaagtgatcttggtgctggcaatcacagaagtgaagctgagagggctgtgtgaggtggcctcggtgctggtgagcgaagcagtgaagctgggaggactgtgtgaggtagtcttggtggtggtgatcaaagaagtgaacctgggaggaaagggtgaggtagtctc

SEQ ID NO: 4520 - DNA, 350 bp, Protomyxzoa rheumatica
ctttcttttgattgagcagttttgaaacagtctctttgtagaaactgccagtagatatttgggacgccttgtggcctatggtgaaaagggaaatatcttcacacaaaaacggaagcattctgagaaactactttgtgatgtatacattcatctcacagagttgaatgagcagtttcttttgattgagcagttttgaaaaactctttatgtagaatctgcaagtgtgtatttggagcactttgcggcctatgtgggaaaaggaattatcttcgcacaaaaactaggcagaaacattctgagaaacctctttgtgatttgtgcattcatctcacagagttgaacctttcttt

SEQ ID NO: 4521 - DNA, 127 bp, Protomyxzoa rheumatica
caaaaggagagcggacatatattctctctctaaagaataaagttgacttaaaaacttttctctcagaactttactgaaatagcactggaacaagcagcgatagttaaccagggagtctggaactgcc

SEQ ID NO: 4522 - DNA, 138 bp, Protomyxzoa rheumatica
aaactttatcatatcatggggttcaatgaaaatatcaaatcataaatataacaatcaaatctgaaagtgaatctagtttcaaagatctcagaaaccactgtgtaggaagctcttttcagatagagacaagggattatt

SEQ ID NO: 4523 - DNA, 212 bp, Protomyxzoa rheumatica
aacaacaacacattaaagtgcacttaacaaaaaattagggctcccaaattagtctcatctagggatgccagctgatatgcagaaggttctaaaaagatgccaatatttttatttaaaacacatactttgctctggctggaatggaaaatattagaatttaggtactcccatgcagctggtggggtggcaacttgcaaaactgagacgatttt

SEQ ID NO: 4524 - DNA, 148 bp, Protomyxzoa rheumatica
gacactcaaagcataccagattcactacagcttaagattagcctaacaaatcttttttcccatgaatcaaaactttacagaggatattaacagtgatttttatcattcattcaactggtttgcacagagagagactggccagaagtct

SEQ ID NO: 4525 - DNA, 389 bp, Protomyxzoa rheumatica
aaagagtgtttcaaatctgctctctctaaaggaaggttcatctgttgtcagttgaatacacacaacaggaagaagttactgggaaatcttctgtctagcattatatgaagaaaccccattcccaatgaaggcctcaaagagttcccaatatccacttgcagactttacaaacatagcgtttcccaactgctctatgaaaaggaaggttaaactctgttaggtgaacgcacacatcaaaacgcagtttctgggaatgattctgtctactttttattcgaagatatttccttttctaccgttggcctcaaagcgcttgaaatccccacttgcaaattccccaaaaagtgtctttcaaatctgctctatctaaaagaaggttcaactctgtg

SEQ ID NO: 4526 - DNA, 206 bp, Protomyxzoa rheumatica
aaagctggtctggaagactgatgtccacatgctaagagaaacagtcactcataacacacacactgcacacaccacgccatgtgtacccgcacacacacctcacacacagacaccacacaaacagcacacaccatgtgcacatgcacacacaccccacacacagacaccacacaatcagcacacacaccatgtgcacaggcacacac

SEQ ID NO: 4527 - DNA, 174 bp, Protomyxzoa rheumatica
attaagaaaaaggaagcatataacacataagagaattccaatgtgcctggcagcagacttctcagcagaaacaatatggaccaggagagagtaggataatagaatcaagtgcagaagaaaaaaactgtcaacaatgaatacagtatccagcacagctctcatttagaaatgaag

SEQ ID NO: 4528 - DNA, 425 bp, Protomyxzoa rheumatica
gagtggagtggagtggaatggagtggaatggaatggagtgtagtgaaattgaatggaaaggaatggaatggaatgaaatagaacggaatggaatggaacggaatggaacggaatggagtggagtggagttgagtggagtggatgggatagcagtggaatggaatggaatgaaatgcaattgaatgaaatggagtggaatcatgcaatgaaatgtgagctaagattgtgccactgcactctagtctgggagacagagtgagatatagtcgaaataaaagaatggattgaaatgcagtagaatataatggaatggagtggagtggaatggaatggagtggaatagaatggagtggagtggaatggaggggagtggattggagtggagtggaatggagtggaatggaatgaaatggaatggagtggag

SEQ ID NO: 4529 - DNA, 304 bp, Protomyxzoa rheumatica
aaccttttatatcatgaaaataacaagggaaaaaagaaaaaagccatctaaattgctttcttaatttatttactttctccttaaaggaattgtttgggtttcctacaatctggtcaacatttttaggtgaggggatgcagggggatgatcctagcaacagcagttatcttggtcctccagttcctgtgtcctacaactcactacttcttggttgtatacccaaaatacattttcatgacaataaggtttgtcaattgtgttaggcttgtttgaatgtgcttctggtttcattgtttttctctat

SEQ ID NO: 4530 - DNA, 431 bp, Protomyxzoa rheumatica
tactccaatcacaatagagtgaaactagaagttaataacaaaaaagtagggaaacccaaatacgtggatattaaacaacacacatccaaattactaatcaaagaagaaatcaaaacagaaatttgaaaatatacttagaggaatgaaaatgaagtcacaacatacaaaacttaatgaaagacaattagagacatgcttacaaggaaatttattgctgtaaatacagataataaaaaagagaactatttcaaatcaacaacataacttttgacataaggacactgggaaaaggagagcaaatggaagctaaagtaagcagaaggaaggaaataataaagatcatagcagaaaccaatgaaacagagaatagaaaagcaacagagaaaaacaatgaaactaaaagcacattcaaacaagcttaacacaattga

SEQ ID NO: 4531 - DNA, 163 bp, Protomyxzoa rheumatica
tcttgtagtagtttcatagtttgaagtcttagatttaagtctttgaacaatttttgatttgtgtggtgagagataggggtctagtttcattcttctgtatatggatatccagttttcctggagccatttattgaagagactgacctttcttcaatgtatgttc

SEQ ID NO: 4532 - DNA, 536 bp, Protomyxzoa rheumatica
ttttatgtgaagatatttgtttttccacagtaggccccaatgagctacaaatatccactcgcagattccgtaaaaagagagattcaaaactgctgaatcaaaagataggttcaacactgtgacttcagtgcacacctcacaaagaagtttctcagaatgcttctttgtagttttgatatgaagatatctccttctccaaaatagatctcaaagccctccaaatattcacttccagattctatggaaagagtctcaaaactgctcagtcaaaataaaggtagaactctgtgagaagaatgcacacatcacaaagaagtttctcagaatatatttgtgtagtttttatttgaggatagttccttttctaccataggctgcaaagggctccaaatatccacttgcagatggtacaaagagagagattctaaactgctcaatcaaaaggtagtttcaaccctgtgatatgaatgcacacatcccagagaagtttctcaaaatgcttctgtttagtttttatttgaagatatttccttttc

SEQ ID NO: 4533 - DNA, 227 bp, Protomyxzoa rheumatica
gaccacaggagtgatctgcaataatatgtgaggaacaaacatttagaccagagcacgaatgttctggaatcctaagtgagggacacatattcagtcaacagcagaagtgttctggaatcttatgtgacggacacacattcagaccacagcaggagtgttctgcaatcctttgtgagggacaaacatttagacccacatagcagtgttctggattcgtacgtgtggga

SEQ ID NO: 4534 - DNA, 129 bp, Protomyxzoa rheumatica
agggttatgtaactcgtgtctaggctctgcctacgggggcattgtgacttatctccgcacttatcaccctggagatgtgagtcttgtctaagctcttcctagagggacattgggacatatctctgcact

SEQ ID NO: 4535 - DNA, 122 bp, Protomyxzoa rheumatica
gtagcagtgttctggaatcctatgtgagggacaaactttcagacccgagtagcagtgttctggaatcctatttgaggaacaatcactcagatcacagcaggaatgttttggaatcctatgtg

SEQ ID NO: 4536 - DNA, 162 bp, Protomyxzoa rheumatica
ggacatttggagggctttgaggtctgtggtggaaaaggaagtatcttcacatagaaacgagacagaagcgttatcagagacttctttgttatgtgtgcattcaactcacagggttgaaccttccttttgatggagcagttttgatacactgtttttgtagca

SEQ ID NO: 4537 - DNA, 211 bp, Protomyxzoa rheumatica
tcacataggattccaggacactccagttgtggtctgaaagttttttcctcctattgggttccagaacatgactattgtggtctgaatgtttgaccatcacaaaggattccagaaccctccttctgtggtctgggtgtttgtgcctcatatgggattccagaataatcctgctgtcgtctgaatgtttctccctcacataggattccaaaac

SEQ ID NO: 4538 - DNA, 129 bp, Protomyxzoa rheumatica
agataacttctatctagttttcctctggaaatatttggtttgccagaaaggcctcaatgggcttccaaatgtcccttcacagattctctcaaaagagtgtttccaacctgaagaatcaaaagaaagctt

SEQ ID NO: 4539 - DNA, 153 bp, Protomyxzoa rheumatica
tccccagagaaaaactggaaagaagatatctgtaaaactgctttgtgatgtatggattcatctaacagagataaacctttcttttgatacactagtttggaaatatatttttgtagaatgtgtggattgacactttggagccgattaaggcct

SEQ ID NO: 4540 - DNA, 232 bp, Protomyxzoa rheumatica
gacagatctctccactgctcacccaggtgatgtaacaattatcttggctttgcctacagggggctttctgatatacatttccactgatgaaacaggtgatgtaacctttgtcaaagttctgcttacaggggctttgtgacatatctctgtactgatcaccccagggtggaaccacttttctgcactccgcctacaggaggctttacgacttatccctgcactgatcactagg

SEQ ID NO: 4541 - DNA, 154 bp, Protomyxzoa rheumatica
tttgattccattccattaaattcctttaaatttcattcgagtcctttcaattacattggaataaattccatttcattcccttcgagtccattccattccatcccattcatttccattcaagtccattccattccattttattccattccattca

SEQ ID NO: 4542 - DNA, 400 bp, Protomyxzoa rheumatica
tgagggacaatcattcagaccatcatagccgtgttttggaattctgtgtgaggggcaaacattcagaccgtcgtaacagtgttctgcaatcctgtgtgagggaaaaacattccgaccacagcaagagtgttctggaatcccctgtgaggaacaaacattccgaccctcatagcagtgtactggaatcttatctgatggacaaatatttagaacccagcagcagtgttctggaatcctatgtgagtgacaaacactcaaaacatagcaggagtgttttagaatactatgtgagggataaacaatctgaccttcacaacagtgttctggaatcctgagtgagggataaacattcagaccctgatagcagtgttctggaatcctatgtgagggacaaacattc

SEQ ID NO: 4543 - DNA, 176 bp, Protomyxzoa rheumatica
ctgaatgtttgtacctcacataggattccagaacactgctacgaggttttgaaattttgtcccacacacaggattgcagaacacagctatgagggtctaaaagtttgtttctcaaagggaattccaaaacagtcctgctgtggtctgaatgtttgtccctcacataggattccaga

SEQ ID NO: 4544 - DNA, 172 bp, Protomyxzoa rheumatica
aagaaatggagtggaatggagagcagtagagttgagaggagcggaatggattggaatggaatcagatgtaatggaatgtggtggagttgagttgagtggagtggaacggaatggaaaggaacaaaacataatggaacggaacggaatgtgtgctgagattgtgccactgcgc

SEQ ID NO: 4545 - DNA, 185 bp, Protomyxzoa rheumatica
aacattcggatcctcttagcagtgttctggaatcctatgtaacggacaaacattaagaccccaactgcaactgcagtgttctggaatcccatgtgagggacaagcattcagacccttgtagcagtgttctggattcctatgtgagggagaaacactcaaaacccagcaacagtgttctggaaccc

SEQ ID NO: 4546 - DNA, 466 bp, Protomyxzoa rheumatica
taggattccaaaacactcctgctgtgttctgagtgtttgtagacacatcagatccagaacactactgttgtgatctgaatgtttctgcatcacaccagattccagaacacgctacgaggttctgaatgacggtcccacacataggattccagaacaccgctgctggggtctaaatgtttgtccatcacacaggattcaagaacagtgctacgagggtctgaatgtttcttcctcactggggattccagaatactcctgctgtggtctgaatgtttgtccctcacacagaattccagaacactgctacgacgttctgaatgatttaccctcacatacgattcccgaagactgttcctggggtctgaatgtttgtccctcacataggccttcagaacactgctgctgggttctacatgtatgtccgtcacataggattccagaacactgctaagaggatccgaatgtt

SEQ ID NO: 4547 - DNA, 148 bp, Protomyxzoa rheumatica
aaaactagacagaagcattctcagaaacttctttgtgatgattgcattcaacccacaaaactgaaaattccttttcatagaacagttttgaaacactctttttgtataatgtgtatgtggaaacttggagtgctttgaggtctctggt

SEQ ID NO: 4548 - DNA, 265 bp, Protomyxzoa rheumatica
ccattcaattaagttggatgattccattagatgtgacactattcgattccatttggtgattccattcgattgtattccatgattccattccaagattattccattcgattgctttgggtgattccattcaattccattcgaagatgattactttcgattccatttgattattccattcaattgcattcgattatgattccattcgatttcattcgatgattccattccattacattcaatgatgattccattcgatgatgaatcc

SEQ ID NO: 4549 - DNA, 237 bp, Protomyxzoa rheumatica
atggaatggactcaaatggaatggactggaatcaaatgtactccaatggaagggagtcgaatggattgtactcgaatggaatggattcgaatggaaaggaatcacatggaatttaattgaagggaatataatcgaatggaacagaatgtgttgatgtggagtggaggggaatggattggaagggaatggggtggaatggaattgaatgcagtagagagcagagtcttggaatggaat

SEQ ID NO: 4550 - DNA, 169 bp, Protomyxzoa rheumatica
tgatgcctgggctcctagccagcgtctgggaactgaccttgagtgtgtgcctgagcatacactgtctgctgatgcctgggcttctagtcagtggagagcttcctggcttactctccttcattcctcagtgttaatgtgaggaggagctgctggcaatctggtcagcttg

SEQ ID NO: 4551 - DNA, 151 bp, Protomyxzoa rheumatica
cagagatatgtcacaaatccccctctaggcagtgtatagagaagagtaccatcacctggttgatcagggcagagatatttcacaatgacccgtgtaggcagagagtggacaagagttacatagcctaggtgatctgtgcagagatatgtca

SEQ ID NO: 4552 - DNA, 128 bp, Protomyxzoa rheumatica
actctgtgagttgaatgcacacataacaaagaggcttctgagaatgcttttgtctagtctctatttgatggtatatacttttccaccacaggccttaaagtcgaccaaatgtctgcttgcagattcta

SEQ ID NO: 4553 - DNA, 129 bp, Protomyxzoa rheumatica
aaatgtctgcttgcagattctacagaaaagtttttcaaaactgctctaagaaaagaaatgttcatctctgtgttgaatgcacagatcacaaagaggattctgagaatgcttctgtctagtctccatgtg

SEQ ID NO: 4554 - DNA, 213 bp, Protomyxzoa rheumatica
ctactcaagcctcagcaatggcaggggacccacccccagcctcgctgccaccttgcagtttgatcttcgactgacgtgctagcaatgagtgaggctccgtggacgtaggactctctgagccaggtgcaggatataatctcctggtgtgctgtttgtgaagctggttgtaaaagtgcagtattagggtgagagtgacccgattttccaggtgcc

SEQ ID NO: 4555 - DNA, 195 bp, Protomyxzoa rheumatica
tgtaccttttcttttaagatatttccttttcattcataggccacaaagggcaccaaatatccaattgcagattctacgaagagagatccaatactgcccaatcaaaagataggttcaactatgtgagttgaatgcacacatcacgaagaagtttctcagaatgcctcagtgtagttcttatgtgaagatatttgt

SEQ ID NO: 4556 - DNA, 166 bp, Protomyxzoa rheumatica
agtgccatttcttagaaatcactcatgggaatgcacacttataggtcatgtgtagagattttatttatttgtttgtttgtttatttatttatttatttatttgcacgggaaggtggggggacggagttttgctcttgctgcccaggctagagtacaatggcgtagg

SEQ ID NO: 4557 - DNA, 231 bp, Protomyxzoa rheumatica
cttctttgtgatgtgtggattaatatcacagaattaaaactttctttttattcaacaggttggacacactgtttttggagaatttgcaaagggacatttgggatcctattgaggcctatgaagaaaaatggaatatccccagataagaactaggaagaaggtatctgagaaactgctttgagatgtgtggattcatctcacagggttaaatatttcttttaattcagcaga

SEQ ID NO: 4558 - DNA, 271 bp, Protomyxzoa rheumatica
attatcaaatgaaatcaaatggaatcatcgaatgccctcgaatggaatcaccaatgaatggaatcagatagaatcatcatcgaatggaatctagtagaagcattgaatgaaatcgaatggaatcatcttcgaatggactcgaatggaatcatcatcgaatggactcgaatggaatcatcttcgaatggaattgaatggaatcatcattgaatagaatcgaatggagacataatggaattggatcaaatagaatcatcatggaattgaatcg

SEQ ID NO: 4559 - DNA, 166 bp, Protomyxzoa rheumatica
aggccttcattggaaatgggaatatcttcacatataagccagacggtagcattctctgaaaattttgtgtgatgagtacattcaactgatggagttgaatctttctttttatatagaagtttggaacactgtttttgtgtaatctgcaagtgtaccttttgtgata

SEQ ID NO: 4560 - DNA, 177 bp, Protomyxzoa rheumatica
agtctttcaaacctgctctatgaaagcgaatgttcaactcggtgacctgaatgcagacatcacaaagcagtttctgagaaagcttctgtctcaattttacatgaagatattcccgcttccaacgaaatcttcaaagttatccaaatatccccttgcagattctacaaaaagagtgtt

SEQ ID NO: 4561 - DNA, 394 bp, Protomyxzoa rheumatica
tttcaaatcagtgtaaccagtagtagtgtcaagatagctctgagtccaaaaggccaaagaacacctctaggtggaagctaatcctttactggaggctccaaattttaaaatcaagattttcttgacctcaggatgaactgatcaatgcaaatctccccaaatattttcactaatccttaattggaaagtaagactccagattttttaaccttcactaaaaataaatatctgattttttttcacctgggatctatgtatgtgtgttggagcatgcctttactaatcagcataaagttacaactctccttgtgcctctattttctacttgtgcagagtttaaagtacacaggtgacagcttagggttttctgggtcttttgctaagcatgtacctg

SEQ ID NO: 4562 - DNA, 283 bp, Protomyxzoa rheumatica
aaagcaatttaatttctcacaggatcctgattcctataagaaacacatcaattcctataattcggcatatttcctctcaatcatttttctacacattttaaattttgagttctaatgtataagtttggttatactttttaatgtatgcctttcattaatatgtttaatggtatatcatctcataagcacttctccatgtgataaaaaattctttgtacatcccatttttaatacatatatgtagctccaaagaaaaggcatatcttgtttactcttctaatcc

SEQ ID NO: 4563 - DNA, 157 bp, Protomyxzoa rheumatica
aattgtccacttgcagattctacaaaaagagtgtttcaaatctgcccaatcaaaataaagtttctactcggtgagatgaatgcacacatcacaaagaagtttgtcagaatatttccatctagtttttaagtgaagatatttccttttccaccatagg

SEQ ID NO: 4564 - DNA, 144 bp, Protomyxzoa rheumatica
agtggaatggaaaggaatggaatggaatgaaatggaatggtgaaatgtaatgtgttctaagattgtgccactgaactccagtctgggtgacagagtgagatccagaagaaacaaaggaatgcaatggaatggagtagaatggaa

SEQ ID NO: 4565 - DNA, 188 bp, Protomyxzoa rheumatica
accccgtagcagtgttctggaatcctatgtgtcagacaaacatttaaaccccagcaacagtgttctggaatcttatgtgagggagaaatattcagacaatcgtagcagtgttctggaatcctgtgtaagggacaaactttctgatccaagcagcagtgttctggaatcctatgtgagggacaaacatt

SEQ ID NO: 4566 - DNA, 142 bp, Protomyxzoa rheumatica
cgaatgtaatgcactcaaaaggaatggacacaaatagaatggacacaaagggaatggtctcgacaggaatttattcgaatacaatggaatcaagtagaatgcaatattatggaatggaatcgaatgtaatggaatcgaatgg

SEQ ID NO: 4567 - DNA, 176 bp, Protomyxzoa rheumatica
acctctgcactgatcacacaggtgatataactcctctctaggatctacctactgggtgcttggtgacatatccctgcactgatcacccaggtgatctaactctcgtctgagctctgcctaaagggcattgtgacagatctctgcactgatcacccaggtgatgtaactcttgtcta

SEQ ID NO: 4568 - DNA, 191 bp, Protomyxzoa rheumatica
gatatatgtactcaactaacagagttgaacctttctatttctgggtcagttttgagaagctctttttctgtaatctgcaagtggatattcggatagctctgaggatttccttggaaacgggatttcatataaaatatagacagcagcattctcagaagcttctttgtgatggttgcttttaagtcacagag

SEQ ID NO: 4569 - DNA, 222 bp, Protomyxzoa rheumatica
atcttcatataaaaactacacagaagcattctgagaaactgctttgtgatgtgtgaagtcatctcctggaattgaacctttcttttgcttgaacagctttggaacactctttttgtaggatctgcaagtggatatttgcggtgctttgaggactatttaggaaaagaaaatgtcttcacataaaaactacacagaagcatcctgagaaacttctaggcgatg

SEQ ID NO: 4570 - DNA, 385 bp, Protomyxzoa rheumatica
tttactaggtgataaagttattatttatttgaaatctttgctctttttaaatgtatcttagctgcaaacttttcatcttaacactgtttttgctgtttcccataacttttgatatgttttgttttcatttttcttcctctgtatgttcctacttcttccgtgatttcttcctttacttaatttatacaattttgtaattctttaagttgtaattgtgtagttgtttaatttatacaattttgtaaactttctagcatttcatctgttattgatttaatttgagatctactatacagcccatcctgaagaattccccatgtgcatttgagaagagtgtgtactctgttttgttggatggagtatattgtatatatctgttagatca

SEQ ID NO: 4571 - DNA, 182 bp, Protomyxzoa rheumatica
gaatcaaatggagtggaatggatttgaattaaacggactcgattgtaatggactggaatggaatggactcgaatgatatggaatcaaaagtaatagaattgaatggaatggaatctaccggaatggattcgaatagaatggattggaatggaagagtcttgaatggaacggaattgaatgga

SEQ ID NO: 4572 - DNA, 326 bp, Protomyxzoa rheumatica
attccattccattcgggaactttcctttcctgtcaattctattcgagtccattccattcctttccattccattacattctgttgcatttgattcacttccatttaagtccattccattgatgtccaatccattcccgtccattccactccaatctattctattctattcctttccattggattccattacttttgatttcattccttttgattccattgcatatgtgtccattccattcgaatcctttccaccccagtccattatattcgggtcgactctgatccactctcttacattccagtgcattcctttcaattccattcca

SEQ ID NO: 4573 - DNA, 128 bp, Protomyxzoa rheumatica
tatccacttgcagattctacaaaaagaatgtttcaaaacttctgtatcaaaccaacagttcaactttgttattggaggacacacatcacatataagtttctgagaatgcttctgtctagtgtttattt

SEQ ID NO: 4574 - DNA, 156 bp, Protomyxzoa rheumatica
ccataggcctcaaagtgctccaaatgtccacttgaagattctacaaaaagagaatttcaaaactgcttaatcaaaagaaaggtttaagtctgtgagatgaatgcacacaacactaagaagcttctcagattgcttctgtcagattttacgtgaaga

SEQ ID NO: 4575 - DNA, 205 bp, Protomyxzoa rheumatica
acataggattccagaacactgctgctgggtttcgagtgtttgtcgctcatataggattccagaacacagctacgaaggtctgaatgtttgtccatcacataaggttccagaacactgctacgagggtctgaatgtttgtccctcagatagggttccacaacactgctgctttcgtctgaatgtttatccctcacataggattcca

SEQ ID NO: 4576 - DNA, 180 bp, Protomyxzoa rheumatica
gcagagcttagacaagagtcacatgtcctgggtgatcagtacagagataagtaacaatgcctccataggaagagcctagacaacagttacctaacccagctgatccaaacagagtgacgtcacaacgccctctttaggcacagagtagaaaaccggtacatcacctgggtgatcatcgca

SEQ ID NO: 4577 - DNA, 157 bp, Protomyxzoa rheumatica
acttaaagctgcactgatcactcaggtgatgtaactattgtctaggctctgcttaaaggggccttgtcacatatctgttaactgatcacccaggtgttgtaacccttgcctaggctctgcctacaggagctttgtgacatatctctgcactgatcac

SEQ ID NO: 4578 - DNA, 170 bp, Protomyxzoa rheumatica
acgtattggaatgcagtgaagtggattggaatggaagggaatggaatagattggaatgaatggaatagtgaaatgaaatgtgagataagattgtgccactgcactccagtctggttgaaagtgtgtgatcccttcgaaataaaggaatggaatggaaaaaagtggaatgg

SEQ ID NO: 4579 - DNA, 167 bp, Protomyxzoa rheumatica
gttttgaaacactctctttgtagtatctacatgtggatatttgcatccctttaaggcctctggtagaaaaggcaatttatagtaaaactagaaagaagcattctcagaaactagcttctgatgtgtgcactcaactcacagattttaacattttttttgatagagca

SEQ ID NO: 4580 - DNA, 271 bp, Protomyxzoa rheumatica
ctttttatatgtaatcccgtttccaacgcaatcctcagagctatcctaagattcacttgcagattccacgaaaagagcttttcaagactgatctataaatagaaaggttcaactctgttagttgagtacttatatcccaaagaattctcttagaatgcttccgtctggtttttatgggaagacatctctttatcaccaaaggtgtcaaagcgctccagaagtccacttcctgatagtagaaaaagagtgtttccaaactgctgtatcataa

SEQ ID NO: 4581 - DNA, 292 bp, Protomyxzoa rheumatica
attccagaacactgctacgagggtctgaatgtttgtacctcacagagcattccagaacactgctatgagtttctggatgtttatccctcacacagaattccacaatactgctacaagggtctgaatgattgtccctctcataggattccagaacactgctgctgtgttttgagattttctccctcacataggattccaaaagactgctacgaggttctgaattattctccatcacatgggattccagaacacccctgctgtcttctgaatgtttctccctcacatagtgttc

SEQ ID NO: 4582 - DNA, 456 bp, Protomyxzoa rheumatica
atccacttgcagattctacaaaaagtgtgtttcaaaactgatctatctaaagaaagtttcaatagtgtgagttgaatgcacacatcacaaaggagtttctaagaatgcttctgctccagtttttttgtgaaggtgtttccttttccaccataggcctcaaagcgctccaaatatccacttgcagattctacaaaaagaatgtgaaaactgctgaatcgacagaaaggttcaactctgtgagatgaatgcatacatcacaaagaagtttctcagaatgtttccgtgtagtttttttgtgatgatatttcctttcccacaataggcaccaaagcgctccagatatccactttcagattctacaaacagagggtttcaaaactgctcaatcaaaagataggttcaagtgtgtgagatgaatgcacacaacaccaagaagtttctcagaatgcttctgtg

SEQ ID NO: 4583 - DNA, 147 bp, Protomyxzoa rheumatica
aatgaaaaggaatggaatggaatggaatgcagaggagattagcggagtggaatggattggagtggaatttagtacagtggattggaatggaatgcagtggaatccaatagaaaggagtagaatggcatggaatggagtggaatggaa

SEQ ID NO: 4584 - DNA, 164 bp, Protomyxzoa rheumatica
taatggaaaggaatggaatggagtggaatcaaaccgagtcgaatggaatggtatggaatgaaatgaaatagaatggaattgaatggaatggagtggaatcgatagggatggtatggaattaaaccgagtggagtagaatggaattcaatggaatggaatggaat

SEQ ID NO: 4585 - DNA, 188 bp, Protomyxzoa rheumatica
gaatggaatcatcaaatggacttgaaaggaatcatcatcaaatggaatcgaaaggaatgatggaatagtatcgaatgtaattattatcgaatgaaatcgcattgaatcattgaatcgactcgaatgggatcatcatctaatggaatcgaatggagtcatcgacaggatttgaatggaatcatcattga

SEQ ID NO: 4586 - DNA, 535 bp, Protomyxzoa rheumatica
gagtgtgctctgataacaaatggggctctgtcatttgacttgctttggccaatgggacatagaaaatatgatgaaaatgtaggttggaaaagtacttgcccactggtgcttgccttcttgaacaagtgtcagcatgaaccaccagacatgcgagtgaaggcaccagatgaccaaagcctcatttgtgatccagacaacattagcaaaggaaatgcccaggtgaacacaagctaaaatgtgaatcaacagaacttctatcaaataaaatggtcacttctttttaagccattgagtttcgttggttctttagacagaaaacagtaactgatacacctaagccaccagaacttaatgtttttaagaaaatcatgtgaaggagataatgtgaagttacttgtcaaatacaatcactagaacgtcacaacctcatgtagaagttttgcaaatcacaataaatgccaacttgatggaaatcagtgagactgctagtgctaagataccatgtgaatcataaaaagcaactctttgcatatta

SEQ ID NO: 4587 - DNA, 293 bp, Protomyxzoa rheumatica
acctaggtgatctgtgcagagctatgtcaaaacgccacggtaggcagagcctagataatgttacatcacctgtgtgatcagtgcagtgagatgtcacaatatcgctgtagccatatccttgataaaatgacatcacctgggtgatcagtgcggagatatgtcacaatgtctccagtaggcagagcctagaaaagagttacatcacctggttgatcagggcagagacatgtcacaatgccccccataagcagatcccagaaagagttgcatcaccgcggtgatcagtgcagaga

SEQ ID NO: 4588 - DNA, 124 bp, Protomyxzoa rheumatica
ggagtccattcgattattccatttgaatccattcaatgattccattcaattttattcaatgataattccctttgagtccattcgatgatgattccatttaattccgttagatgattccgttcga

SEQ ID NO: 4589 - DNA, 132 bp, Protomyxzoa rheumatica
ttagcaaccttctgaagcctccttctgtcaacaggtcaaagtcattctcccttcagctttgttctgttgctggtgaggagctgcaatcctttgaaggaaaagaagtgttctgggttttaggattttcatctt

SEQ ID NO: 4590 - DNA, 222 bp, Protomyxzoa rheumatica
caaactacacagaggcattctgagaaacttctttgtgatgtgtgcagtcatctaatggagttgaaacttcctttttatagagcagtgttgaagcgatctttttgaagaattagcaatggatgtttggagcgctttgaggcgtactgtggaaaaggaaatatcttcaaaaaaaaaactacacagaaacattctgagaaacttctttgtgatgtgtgcattcaa

SEQ ID NO: 4591 - DNA, 188 bp, Protomyxzoa rheumatica
tgcttctgtgtagtttttatgtgaagatatttccttttccgaaatagacctcaaagtcctccaaatatccacttccagactctataaaaaggtgtttcaaaactactcaatcaaaagaaaggttcaactatatgagataaatgcacacatcacaaaatggtttctcagaatgcttctgtgtagttttt

SEQ ID NO: 4592 - DNA, 134 bp, Protomyxzoa rheumatica
gctcaatcaaaagaaaagttcaactctttgagatgaatgcccgcaccatgaaaaagttcctcagaatgcttctgtctattttttatgtgaagatatatccttttctaccaaagaccgcaaagtgctccaaatat

SEQ ID NO: 4593 - DNA, 161 bp, Protomyxzoa rheumatica
tgattccattcgattccatttgatgattccatcggagtccatctgattattccattagagtccattcgattattccattcgattcctttcaatgagaattccatttgagtccattcaatgatcattcccttcgattccattcaatgattctgttcgattct

SEQ ID NO: 4594 - DNA, 157 bp, Protomyxzoa rheumatica
cctaatgctagatgaagagatagtgggtgcagtgcacaagcaaggcacatgtatacatttgtaattaactggcaaattgtgcacatgtatcctaaaaattaagaataataattaaaaaaacaaaaactagaaaaaaaaagaaaataatatagacgaa

SEQ ID NO: 4595 - DNA, 134 bp, Protomyxzoa rheumatica
gaatgttcaactctgtgagtagaatgcacacaacacaaagaatttctgagaattcttctgtcaagttttatatatagaaatcccgtttccaaagaaggtctcaaaaaagtacaaatattcacttgcagattcta

SEQ ID NO: 4596 - DNA, 122 bp, Protomyxzoa rheumatica
cactccactccagtccattccactccactccactgcactccattccgttacattcctttctatatccattccattatattccactctaaatccgttccattatattccattctaaatccatt

SEQ ID NO: 4597 - DNA, 215 bp, Protomyxzoa rheumatica
tcaaataggaatacagaacactgctactggggtctgaatgtttgtccctcacgtaggattccagcacactgttacgagggtctgaattactgcccctcacataggattccagaacacacctgctttcttctgaaagtttgtccttcacttaggattccaggacactgctgttggtttctaagtgattgtcactcacttatgattccagaacactg

SEQ ID NO: 4598 - DNA, 130 bp, Protomyxzoa rheumatica
tgtgtgaattcaactcatagagttgaaccttactttagacagagcagatttgaaacattctttttgtgcaattttcaggtggaggttttaagcgttttaaggccagtggtaaaaaaggaaatatcttcgt

SEQ ID NO: 4599 - DNA, 216 bp, Protomyxzoa rheumatica
agagctaaagcttcctttggattcagtagtttggaaaatctgtttttgtccattctgcgaatggacatttgggagctctttgaggccagttccaaaaaagggtatatctcaggattaaaactagaagacaggtatgtgagaaacggctttgtgatgtgagcattcatttcacagagttaaaccttccttttcattcagcagttagaaaacactggt

SEQ ID NO: 4600 - DNA, 142 bp, Protomyxzoa rheumatica
atactgtacataaaatatcaaagtacccaaaatatatattatgtaccatacataaattatgaaagtatccaaacatttataataaattgtacataaaataacaaactacgcaaactgtatattatataatgtaaataaaaca

SEQ ID NO: 4601 - DNA, 328 bp, Protomyxzoa rheumatica
tggtgaatttttttgatctcagtacggtattcatagtccacgatgtcaaaataattacatgattctcatgttttcttcaaggttttgttactccaatcataatgagactagttgatgtacaaagaatgtgctgcatactagtatgtaagacttttaagtgagtacaatacattagtgatgacatcatgctggttatcagaaggataataccaagaaacttaaatgcgccccttaacaggaatttcagcaaagaaaacattaaaatcaaacaattcaaaattcaggcaaaagagagagtactacagtattcaagtcctattgttcatag

SEQ ID NO: 4602 - DNA, 142 bp, Protomyxzoa rheumatica
aggacttaatttatgaatccgggtcctcctgtgttgggtgcatatatatttacagtagttagctcttcttgctgaattaatccttttgccattgtataatggccttcttagtgtcctttgatctttgtttgtttaaagtctg

SEQ ID NO: 4603 - DNA, 264 bp, Protomyxzoa rheumatica
taccagtacaagcccctgcaaaaaacatgtcaaattgtaaagaacattgatactatgaagaagctgcatcaaaaaatgggcaaaagatcaagctaacattataatgacaggatcaaattcacacataacaatattaaccataaatataagtgggctaaatacctcaattaagagacagagcctggcaaattggttaaacagtcaagaatctttggtgtgctatattcaggagacacatctcacatgcaaagacacacataggct

SEQ ID NO: 4604 - DNA, 173 bp, Protomyxzoa rheumatica
tttgtgatgtgtgcattcatctcactgggttgaatctttgttttgattgagtagtttggaaaaagtctttttgtagaatctgcaaagggatatttggagagctttcagccctatgttgaaaaaggaattatattcacataaaaagtagacagaagctttctgagaaacttctt

SEQ ID NO: 4605 - DNA, 132 bp, Protomyxzoa rheumatica
tggaatggaatgcaatggactcgaatggaatggactcaaataggatggacaaaaaaggaatggtctcgaatggaatatattcaaagaatggaatctaatcgaatgcaatagtatggaatggaatcaaatgga

SEQ ID NO: 4606 - DNA, 250 bp, Protomyxzoa rheumatica
ctttggttttctggaatcctacgtgtgagacaaacatttagacccttgtagcattgttctggaatccgatgtgagtaaatacattcagaacacagcaggagtgttctggagtccaatgtgcgggacaaacattcagacccacgtataagtgctgcggaatcctctgtaagggacaaacatttagacccacgtagcagtgttcttgaagcataagtgagggacaaacactcagaacccaacagcagtgttc

SEQ ID NO: 4607 - DNA, 139 bp, Protomyxzoa rheumatica
aatggaatggaatggaatggaatggaatggaattgaatggatgggagtgaagtggaatgggattgagtagagtgaatttaatggagtacaatggaatggaaaggaaaggaattgaatggagaggattgtaatgtaatgg

SEQ ID NO: 4608 - DNA, 180 bp, Protomyxzoa rheumatica
cattccattccattccattccattccattccattccattatattacattctattccatttcattcggtttgattccattccattccgttccgttgcattctgttccattccattcgactcgggttgagtccaatcaacttcattcatttccattccattccattcgggtttattccattc

SEQ ID NO: 4609 - DNA, 192 bp, Protomyxzoa rheumatica
ttccattcctttccactccactcgtgcttattcaattcagttttattccgttccattgcattctattccattccattcatttacaatccattcaattccattctagaccaatccattccattccaatcgtgttgactcctttacattccataccattctattccattccattctattccattccattccatt

SEQ ID NO: 4610 - DNA, 143 bp, Protomyxzoa rheumatica
attcccgtccattccattcgattccattccatacatttgcattcccttagattccattctatttgaataaattccattagagaccattcctttcgactctattccattcaattccattccactcgattccattctattcaatt

SEQ ID NO: 4611 - DNA, 125 bp, Protomyxzoa rheumatica
ccaggtgatgtaactcttttgtaggatctccctacaatgtgctttgtgacacatccctgcaatgatcacccgggtgatgtaccacttgtcaaagatctgcctacaggggcattgtgatgtatctc

SEQ ID NO: 4612 - DNA, 148 bp, Protomyxzoa rheumatica
gttctttttcatttttgttgttttggttttcatatagccactctaatagatgtaaagtggtaacttgttgtggttttgatatccatatccctcatgactggtgaggttgagcatttttctgtagactttttgacccaatgtttataca

SEQ ID NO: 4613 - DNA, 201 bp, Protomyxzoa rheumatica
tggagttcagtggcacaatcttagatcacatttcatttcaccattccattccattccattcaattccattccataccactccattccactccactccactccacttaattccattatatccgatgccattccactccattccactcctctcctctcgactgcactccactccattccattccatcccattccattctgctc

SEQ ID NO: 4614 - DNA, 141 bp, Protomyxzoa rheumatica
cattccattccattccattccatttcgttccattctgttctaatctatgcaatttcattttattccagtccattccactcgagtccattccattccagtaaattgtatccgattctgatccattcggttccattccattcg

SEQ ID NO: 4615 - DNA, 293 bp, Protomyxzoa rheumatica
ccatttgagtccatttgattatgaatccatttgggtccattcgatgattccattcgagtgtattcgataattccatttgagtccattcgatgattgcttttgattcaattcgattatattcaatttgagtcaattgattgatgccattcgattctattagatgatgattccattcgtgtccattcggtgattccattcgatttcatttgatgatgattccttttgagtgcattagattattccattctattctatttgatgatgattccattcgagtccattcagtgattcca

SEQ ID NO: 4616 - DNA, 130 bp, Protomyxzoa rheumatica
gatgtgtgcattcatctcacagagatgaacctagtttttcattaagcggttttgaaacactgtttttgcgagtctataagttgatatttggagcactttgaggccgacagtggaaaagtaaatatcttca

SEQ ID NO: 4617 - DNA, 122 bp, Protomyxzoa rheumatica
actctgtgagttgaatgcacacatcacaaagaagtttctctgaatgcttttgcttaatttctatgtgaagatattcccttttctaccacaggcatcaaaacgctccaaatatccacttgaag

SEQ ID NO: 4618 - DNA, 270 bp, Protomyxzoa rheumatica
ttctggaatcctatgtgagggaaataacattcagaatacagcaggagtgttctggaatcctatgtgtgggagaaatatttagacccacgtagcagtgttctggaatcgtaagtgagggacaaacactcagaaccaaacaggagtgttctggaatcctatttgagggacaaatattcagacactcatagcagtgttctggaattctatgtgatggacaaactttcagaactttgtagcagcgttctggaatcctatgtgatggacaagcat

SEQ ID NO: 4619 - DNA, 217 bp, Protomyxzoa rheumatica
tgtccccgagctgtgtgcatgctgggactgtagtcttgcagcccggtgatgaaagggctgggagtttatgagactacatctcccagcaagcccaccgaggcgcgcacggccctgcctcttcctccagtgacgcgcactttccctgagtccgttgcatgctaggattgtagtgctgcagccctgtaaccaaaggactgggagcgtttatgagactgca

SEQ ID NO: 4620 - DNA, 221 bp, Protomyxzoa rheumatica
gatgtacactttaccacaaagtaaaaaaaataacttttaaataaacaaactatagctatctgcaatatcatgaattaataccgtaaatataatgttgaatagaagaaagtcgatgtaaaagtatacatattatacaatttcactcatataatatccaaaaagtgaacgcaactgaggttctggcttccagtaataattaagtaaagtaatttgttgaatac

SEQ ID NO: 4621 - DNA, 149 bp, Protomyxzoa rheumatica
taaaatctacatagaggcactctaagaaacttctttttgatgtgtgcattcacctcacagagctgaaccgatccttcgagtgaccagttttgaatctctctttttatacaatctgcaagtggatatttggagccctttgcggcctatgg

SEQ ID NO: 4622 - DNA, 405 bp, Protomyxzoa rheumatica
ttccagaacactgctgctggagtctacaagtaggtctgtcacatagggttccagaacactgctacaggaatcggagtgtttctccctcacatagaattcaagaacactgcgaggagggtctgaatgtttttccttgtcataggattccagaacacacctgcagttgtttgaatgtttttccctcacataggattccagaacactgctactggggtctgaatgtttttccctagcataggattccagaacactgctacgattgtctgaatgtttgtccctcacttaggattccaggacactgctacgaaggtctgaatattagtccctcacataggattccagagcaatcctgctgtggtctgaatgtttctcactcacatagtgttccagaatgctgtcgctggg

SEQ ID NO: 4623 - DNA, 134 bp, Protomyxzoa rheumatica
cagtgcagagatatgtctcaatgccccctgtgggcgaagcctatacaagagttacataatctcggtgaacagtgcagtgatttgttaaaatgctcctgtagccagagcctagactagagttacatcacatgggt

SEQ ID NO: 4624 - DNA, 140 bp, Protomyxzoa rheumatica
gtgattccttttgattccaactgaagatgattccattcgattccattcgaggataccatttgataccattcgttcatgataccatttgagtgtattccatgataccattcgatccaattcaatgatgaatccattcgatt

SEQ ID NO: 4625 - DNA, 177 bp, Protomyxzoa rheumatica
accacagcaggagtgttctggaatcctatgtgagggacaatcactcagacaatcgtagcagtgttggggaatcctaagtgagggacgaaaattcagaccatcgtatcactgttctggatccgaagtgagggataaatattcagaccacagcagagtgttctggaatccacagtgagg

SEQ ID NO: 4626 - DNA, 341 bp, Protomyxzoa rheumatica
gaaatagtatggaatagaatccaatggaatggaatggaatggaatgaactggaatacaacacactcgaatgtaatggattgcaatgtaattgactcaaatgaaatggaattgaatttaatgtagtcaaatggaatggaaaggaatgcaagggaatggaacagaatggaatgcaatagaatggaatggagtggaatcgagaggaatggaaacgaatggaatggaattgaatggaattgattcgaatggaatggactcaagaggaattgtcttgaatggaatttattcgaagagaatggaatcaaattgaatgcaatagtatggaatggaatcgaaaggaatg

SEQ ID NO: 4627 - DNA, 141 bp, Protomyxzoa rheumatica
cacagacttgaaccttcctttagagagaggagatttgacacactcttttcgtggaatttccagatggaattttcagtcgctttgaggccaatgacagaaaaggaaatattttcgtataaaaactagacagaatcattctga

SEQ ID NO: 4628 - DNA, 230 bp, Protomyxzoa rheumatica
cgaatggaatcatcgaaaggaatcgaatggggtcatcatcgaatggaatcgaatggattcatgcaatggaatcgaatggaaacttcatcacatggaagtaaatggaatcatcatatggaatcaaatgcaataatcatcgaacgcaattatcaaatggaatagaatggtatcatcaaatggaatcaaatggtgtcatcatagaatggaatcatcccatggaattgaataca

SEQ ID NO: 4629 - DNA, 585 bp, Protomyxzoa rheumatica
ccattcaattccattccatactattgcattccattcgattggactgtattcgaataaattccattagagaccattcctttttaataaattatatttgagtctattgcattcgagttcaatacatttgggtccatccaattccattccattccattcgatgccattgcattcgattctattccattcgagtccattccatttgattccattccgttccattccattccattcgatcacattcctttcgattccattctgctccagtccattccattcgagtactttccattcgagtccgttccattggaatccattccattccattccattgctttcgatatctttccattacactccattccattctatttcttaagattcaattcaattcctttcctttcagtttcgttccattcaactccattccattcaagtccattccattccattccattcaattccattccattcgattccaatccattcaattccactttgttcaagtcgtttccaatagagtccattccattccagtccattccattcgattcctttccattcgattccattccattctattctgtt

SEQ ID NO: 4630 - DNA, 175 bp, Protomyxzoa rheumatica
ccttggccacatagggagaccctatgtgtttacaaaaaaaaaaaaaaaaattagctggttgtggtggcatcgatttgtggccccaactacttggggggctgaggtgggaagatcacttgagcccaggagggcgaagttacagtgagctgtggttgtgccactgcactccagcctg

SEQ ID NO: 4631 - DNA, 134 bp, Protomyxzoa rheumatica
gatatttggagcgctttgtgtcctctagtggaaaaggaagtatcttcacacagaaacaagacagaagcattctgagaaacgtgtttgtgatgtgagcattcctctcacagagttgaacctttcttttgattgag

SEQ ID NO: 4632 - DNA, 124 bp, Protomyxzoa rheumatica
aatggaatcaaatgaaatgtaatcgattggaatggactggaatataatggactcgaatggattagacaggaaaaaaatggagttgaacagattggaatctaatggaacggaatggaatggaatg

SEQ ID NO: 4633 - DNA, 203 bp, Protomyxzoa rheumatica
agtgttccagaatcctatgtgagggacaaacactgacaatctagaaacagtgttctgcaaccctataagagggacagacattcagaccacaacaggagtgttctggaatcctatgtgatggacaaacattcagtacccaggagcagtgctctggaatcctatgtgagagacaaacatttagacccacacagcagcgttctgga

SEQ ID NO: 4634 - DNA, 123 bp, Protomyxzoa rheumatica
ccagaacactgctgcttgagtctgaaggttttttcgtcacacaggattccagaaccctgctacaattgtctgaatgtttgccactccataggattccagaacactgccacgagggtctgaaag

SEQ ID NO: 4635 - DNA, 137 bp, Protomyxzoa rheumatica
atgattccattggattctattcgaagatgattccatttgtgtccagtcggtgattccattcgatttcattcgatgttgattcctttcgagttcattcgatgattccactcgagtctatgcaatgattaaattcaagt

SEQ ID NO: 4636 - DNA, 277 bp, Protomyxzoa rheumatica
caatttttcaaaaattctgttcagaattgttttttggcttcatagttatttttaggagaatgtttcatgagcttttgagaagattgtgagttttgtttttgtgtagagtgttctgtatgcatctgttatatctaattgctttacagtattttcatgtcgtctgtttactttttaatattctatctggcttttttattaattacagaactggtgtattaaaatattatacttttaatatattgccgtttttgcttatgttctgtcaagatattattga

SEQ ID NO: 4637 - DNA, 124 bp, Protomyxzoa rheumatica
tattgccgtttttgcttatgttctgtcaagatattattgagatatttaaaaatactcatgtaaggtgcatacatattggtgtgaatacataattagatatatacacacaattatataaatgtgt

SEQ ID NO: 4638 - DNA, 137 bp, Protomyxzoa rheumatica
aataaaagcataaaaaagaataacatacagtatcaagacaagacaacctacagaatgtaagaaaatatttgcaaatcgtatatctggtaagggactaatagctttttttgagatggagattccattttgttgtccaa

SEQ ID NO: 4639 - DNA, 141 bp, Protomyxzoa rheumatica
gaatctgcaagtggatatttggagcgctttgaggcctactgtggaaaagcaaataacttcagataaaagctacacaaaagctttctgagaaacttttttgcgatgtgtgcattcaactcacagagttgaaactttcttttg

SEQ ID NO: 4640 - DNA, 178 bp, Protomyxzoa rheumatica
agttcttttagttgtgatgttagggtgtcgatttgacattattctagctttttgatgtgagcatttagtgctataatttctctcttaacatttctttagctgcatcccagagattttggtatgttgactctttgttatcattagtttcaaagaacttcttgattgctttttaacttca

SEQ ID NO: 4641 - DNA, 148 bp, Protomyxzoa rheumatica
caatatgaaccttaatagtaaatgggttaaatgcccccaactaaaagacacagaatagcaagctggataaagagtgaagatcaaccggtgtgctgtattcaaaacacccacctcatgtgcaaagacacacataaactcaaaataaaca

SEQ ID NO: 4642 - DNA, 135 bp, Protomyxzoa rheumatica
gaggggactggggtggaatgcaatggaatgtattggagtggattggatttgagtggaaaggagtggagtggacggaaattgaatggaatgaacaggaacgaaatggactgaaaaggaattgactcgaatggaatg

SEQ ID NO: 4643 - DNA, 123 bp, Protomyxzoa rheumatica
agtgttctgtaatcctaggtgaggaataaacatttagacccatgtagcagtgttctggaatcgtatgtgagggacaaacactcagaaccgcacagtagtgttctggaatcctaagtgagggac

SEQ ID NO: 4644 - DNA, 195 bp, Protomyxzoa rheumatica
atgtaaaatctgtaaatgtcagaatgaatccaaacttaccaattcaaaattggattgtaaaacagctcaaaaaagactgaaaacacagctctacactttaggaggctgaggcaggcagattgcttaagttcaagagttggagacaagtttaagaaacatggaaaaaccgtctctacaaaaaaaaatatttttaat

SEQ ID NO: 4645 - DNA, 204 bp, Protomyxzoa rheumatica
ttttcattgaaccccatgatatgataaagtttgctagaacctgctggaataattgactttgctctcagcattatgaagcccctggggcacataagtagttcatttatgtttctatttaaccacacaggaacaacttaagctacttttctagccactttcgtttagagctgttattgtttgtttttgagacgggtctcactctgt

SEQ ID NO: 4646 - DNA, 123 bp, Protomyxzoa rheumatica
ccctctctgaggattccaaaagaatgctacgagtgtctgaatgtttatgtcacacgaaggatttcagaacaccacaggtgtggtttgagtgattgaccctcacataggattccataacgctgt

SEQ ID NO: 4647 - DNA, 125 bp, Protomyxzoa rheumatica
gagaaacactcacaacccagcagcagtgttctggaatcctgtatgaggaaaaagcattcagactacagcagcattgttctggaatagtatgtgagggacaaacatttagacccacgtagcagtgt

SEQ ID NO: 4648 - DNA, 159 bp, Protomyxzoa rheumatica
tagtttttatttgaagatatttccctttccaccatagagtgtaaatggttccaaatatccacttgcagattctacaaaaagagaaatagatatctgtccaattataagataggttcaaccttgtgaaatgaatgcacacatcacaaagatgtttctcag

SEQ ID NO: 4649 - DNA, 123 bp, Protomyxzoa rheumatica
aggtgatccacctgccttggcctcccaaagtgctgggatttcaggcataagccaccatgcctggcctaaaaccttttttaaaaagatcttttctgtatttgatatagattttgcttgtggtta

SEQ ID NO: 4650 - DNA, 208 bp, Protomyxzoa rheumatica
acaggatgctaattattaacatgaaaacatatgaaagtataaaactcattggtaagagtaagtacatagccaaattcaaaatattctaatactgaaatggtggtatgcaaatcacatatacttagcatgaaggctaaaaaataaaactattaaaaataattatagttacaataatttgttaaggaatacacaatataaacagatgcaa

SEQ ID NO: 4651 - DNA, 149 bp, Protomyxzoa rheumatica
tcctgagtagctgggactacaggccgagctaattttaaaattttttatagagatagggtctcactatgttgcccaggctggtctcaaggtcctgacctcaagcaatcatcttgcctcagcctcccaaaagtgctaggattacagtgagc

SEQ ID NO: 4652 - DNA, 143 bp, Protomyxzoa rheumatica
gagttgtaccttcctttcgatagaccagttttgaaatactctttttgcagaatttccaagtagatgatatttagagcggtttgaggcctgtggcagaaaaggtaatatcttcatagaaaaactagagagaatcattctcagaa

SEQ ID NO: 4653 - DNA, 296 bp, Protomyxzoa rheumatica
agatatttccttttccaccataggactcaaagaactctaaatctccacttgcagattctacagagggtttcaaaactgctcaaggaaaagaaaggttcaactctgcgagatgaatggacacctcacagagaagtctctcagaattcttctgtgatgtttttatgtgaagataatgcttttcaaccataggcctcaaagcgctccatatatccaattgcagattccacaaaaagactgtttcaaaactgttcaattgaaagaaaggttcaactctgtgagatgaatgcacaaatcac

SEQ ID NO: 4654 - DNA, 156 bp, Protomyxzoa rheumatica
tctgaagtgatcacagaggggatgtaacccttttctaggctgtgccaacagagggtattgtaacatatctctgcaatgatcacacaggtgatttaacccttttctagcctctgtctacagggaaattgtgacatatcactgcactgatcacccagg

SEQ ID NO: 4655 - DNA, 132 bp, Protomyxzoa rheumatica
cccaggattaaaactagaagacagctatgtgagaaatgactttgcaatgtgagcattcatttcacaaagttaaaacttccttttcattcagcagttagaaatcacttgttttgtagaatctacaaagggtta

SEQ ID NO: 4656 - DNA, 195 bp, Protomyxzoa rheumatica
gggtctgaaagtttgtcccacatgtaggattccagaacaccacaggtgtggtctgaatgattgtccctcaaataggattacagaagactgccgctgggttctgagggtttctccctcacacaggattccagaataccgctacgagggtctgaatgattgtccctcacataagattccagaaccctcctgctgtgg

SEQ ID NO: 4657 - DNA, 199 bp, Protomyxzoa rheumatica
agtgttctggaatcctatgtaagggacaaacactaagaacccagcagcagtgttctggcattctatctgagggacggaaattcagaccaaagcaggagtattctggaatcctatgagaggtacaatcattcagaacctcgtagtaatgttctggaatcctatgtgagagagaaacactcagaacccagcagtagtgata

SEQ ID NO: 4658 - DNA, 234 bp, Protomyxzoa rheumatica
gtcggaatgctttgaattctatgtgagggacaaacactgagacaatcttagtactattcaggaatcctctgtgaggtacaaatttttagaccacagcagaagtgttctgcaatcctatttgagggacaaacattcaaacaacagagggaatcttctggaatcctatgttacggaccaacattcagaccctcgttgcagtgttctggaattctatgtgagggagaaacactcaga

SEQ ID NO: 4659 - DNA, 304 bp, Protomyxzoa rheumatica
gctgtggtctgaatgtttgtccctcacataggtttccagaacactgctatgagggtctgaatgtttgtccatcacacggaattccagaacacagctacgagggtctgagtgattgtccctcacacaggattccagaacactgctgctgccgtctgaaagtttgtccctcacataggatcccagagcactgctactgatgtctgcatgtatgtctgtcgctaaggattccagaacactgctggtgggttctgagtgtttctccctcacatgtaattcaagaagactgcgacgaggatctgaatag

SEQ ID NO: 4660 - DNA, 159 bp, Protomyxzoa rheumatica
tggaatcaaatggaatggaatcaaattgaaaggagtcgaacggcaccaaatggaatcgaacggattgcggtgaagtggagtggaatgtaatagactggaatggaatggggtggaatggaattgaatatagaggaggggagtggagtttaatggagtcaa

SEQ ID NO: 4661 - DNA, 143 bp, Protomyxzoa rheumatica
gctctgcctacagggggcctgtgacatacctctgcactgatcacccaagtgatgtaactcttgtctgggatctgcctgcaggttgctttgtgacatatcccgtcaatgatcacccaggtgatgtaccacttgtcaaggctctg

SEQ ID NO: 4662 - DNA, 153 bp, Protomyxzoa rheumatica
ttccactccacttcattccattccattttactccattccattccattccttattttcgactggatctcactctgtcacccatactggagtacagtggcacaatcttaactcagatttcatttcaccattccattccatttcattccactccac

SEQ ID NO: 4663 - DNA, 178 bp, Protomyxzoa rheumatica
tgaacctagaaaggagtaacatcacctgcgtgatcagtgcagagatgcttcacaataccccctgtaggtggagctgagacaagaggtacatcacctgggtgatcagtacagatatatgtcacaaagcccctgcaggcagagcctaaacaagagttacatcacctggttgatcagtgca

SEQ ID NO: 4664 - DNA, 132 bp, Protomyxzoa rheumatica
taaagcgttaactctgcaagttgaatgcatgcatcacaaagcagtttctaagatagcttccttctagttttatcctgggatagtccattttttgccattagcctgaaggagctcccaaatatccatttgcag

SEQ ID NO: 4665 - DNA, 150 bp, Protomyxzoa rheumatica
attcagaccccagcagcagtgttctggaatcctatgtgagtgataaacattcaaacaacagcgggagtgttccataatcctatgttacagacaaatattcacaccgtcttcacagtgttcttgaatcctatgtgagggacaaacactcag

SEQ ID NO: 4666 - DNA, 319 bp, Protomyxzoa rheumatica
tccctcacacagaattccagaacaatgcaacgaggggctgaatgattgtctctcatgtaggatttcagaagactgctgctggggtctgaatgtttgtccctcacatacgagtccagaacactgctgctgaggtctgcatgtatgtccatcgcatagaataccagaacactgctgcggagttctgagtctttctccgtcacatagaattccggaaaactgcaatgatggtctgaatgtttgtccgtaacataagattcccgaacactcccgctgttgtttgtttgaatgtttgttcctcacataggattccagaacactg

SEQ ID NO: 4667 - DNA, 143 bp, Protomyxzoa rheumatica
ttttcaccataagcctgaaagcactcaaaatatccctttgcagattctacaaaaaagactgtttgcaaactgctcaattgaaagaaagtttccactatgtgagttgaatgcagaaatctcaaagtagtttctcagaaagcttc

SEQ ID NO: 4668 - DNA, 168 bp, Protomyxzoa rheumatica
tagacagaagcattctgagaaactgctctgtgatgtgtgcattcaactcacagagtggaaccattcgtttggtagaacagtattgaaacagtctttttaacgatctgcaagtgttcatttggagtgctttgaagcctgtggtggaaaaaaaaaatatcttcacataaa

SEQ ID NO: 4669 - DNA, 359 bp, Protomyxzoa rheumatica
cagtctctttctcagatgttttgtataacagtctctttctcagatgttttgtgtaacagtctctttatcagatgttttgtataacagtctttctcagaagttttgtagaacagtctctttctcagatgttttgtgtaagtctctttatcagatattttgtagaacagtccctttctcaggtgtgtcttttgcaaatattttctcccaatctgtggcttttcttctcattttcatgacattggcttttgcagaacagaagttttcaattttaatgaagtcttgtttatgaatcattttaaaatggatcttgacattggtgttatatctaaaaagtcattacctttcccaggataatctaa

SEQ ID NO: 4670 - DNA, 136 bp, Protomyxzoa rheumatica
tgtgatgtgtgtgttcaactcaccgagtttaaactttcttttgatagagcagatttgaaacactctgtttgtaaagtctgcatggggatatttactcctctttgaggcattcgttggaaacgggatttttcatata

SEQ ID NO: 4671 - DNA, 192 bp, Protomyxzoa rheumatica
cgatgattccattcgattccgttccgtgatgattcttatcggttccatttgatgattccatttgattgcatttgatgatgatcccattagtgtccattcgatgattccactcgattccatttgatgatgatcccattcgtgtccattcgatgattccactcaattccattcaatgaagattctatacgagtc

SEQ ID NO: 4672 - DNA, 126 bp, Protomyxzoa rheumatica
gtgtgcactcatctcacagagttgaacctttcttttggttgcgtagttttgaaacactctttttgtagcatctgcaagtgtatatttggagaagtttgcctcctatggtggaaaaggaaatatctt

SEQ ID NO: 4673 - DNA, 180 bp, Protomyxzoa rheumatica
tctaggaactgttccatgtgcagttgagaaaaatgagtattctgcagctgctggatggaatgttctagatatgtctgttatgtccatttggtctagagtatagtttaagttcaatgcttccttatttactttctgtatagctgatctgaccaatgtcgaaagtggcatattgatgttcac

SEQ ID NO: 4674 - DNA, 173 bp, Protomyxzoa rheumatica
ttggatgcaaaacagtgaaaatatatgtaacactactgaaatgtacacttaaaaataagtaagatagcatattttgtgttatgtgtactttaccacaattatgaatttttttttttctcttttcttatttttttgagacaaggtctctgtcacccaggctgtaatgcggtgat

SEQ ID NO: 4675 - DNA, 179 bp, Protomyxzoa rheumatica
tgaaatgtaaatttaactgaattgtcattgtaattgtgtatgttctacttattgggcaagttaaagggcacgatgaacgtttgtagtataatggtgtaaatctttctaatttcttgcaagaaagacatactgggtcatgtaccacctgctttgacattgattctcaggtgtgtgagtta

SEQ ID NO: 4676 - DNA, 191 bp, Protomyxzoa rheumatica
ggagtggaatggaatggaatggagtggaatgcaatggaatgaaatgaaatggaatgcaatagaattcaatggaatgaagtggaatggaatgcaatgtaatgccatggaatggacaggtgaaatgaaatgtgagctgagtttgtgccaccagactccagcctgggtgacagagtgagatcctgtcgaaagaa

SEQ ID NO: 4677 - DNA, 184 bp, Protomyxzoa rheumatica
atctgaggatatttcgtttttccccataggcctcaatgggattccaaatatccctccgatgatcctaggaaaagagtgcttcaaacctgatgtatcaactgaattatataactgtgtgagaaggatccacacaccacaaagggctttctcagatactttgtttgtagtttttatctggagagat

SEQ ID NO: 4678 - DNA, 146 bp, Protomyxzoa rheumatica
gaatggaatcgaatggaattgactagaatggaatagaaagtaatggactcgaatggattggaatataatggaatggacccaaatggaatggaggggaatggaatgaaatcaaaaggaattcgaatggaattgaatggttacgaatt

SEQ ID NO: 4679 - DNA, 231 bp, Protomyxzoa rheumatica
cttctattccattccattcgagtgccttccattccattcaattccattcctttccattcaagtccattcaattccattccattccatttgagcccagtccattccattccgtttgagtcctctccattccttttgaatccattacattccattgcattcgcgtcaattccattctaaactattccattccagtgcattctagtccataccattccattccattccattcca

SEQ ID NO: 4680 - DNA, 157 bp, Protomyxzoa rheumatica
atcgaatggaattgaatggagtcaacgaatggaatcctttggaatcatcatcgaatggcactgaatgcagtcatcatcgaatggaatcagatggaattatcaaattgacgtgaatggaatcatcatcgaatggaattggacgtaattatcaaatgga

SEQ ID NO: 4681 - DNA, 204 bp, Protomyxzoa rheumatica
caaatggaattatcaaatgggctcgaatggaaacatcgaatggacatgaatggaatcattatcgaatggaatcaaatggaatcattgaatggaatcgaatggaatcatcgaatggaattgattggaatcatcatcaaatggaatcattatcaaattaaatctaatggaatcattgaatggaatcgaatggagtcatcgaatgga

SEQ ID NO: 4682 - DNA, 167 bp, Protomyxzoa rheumatica
atccgcccaccttggcttcccaaagtgctggggttacaggtgtgagccatcatgcccagcctagcacatctattttttggcaatagaattcattttggagtcttacttgattaatcaaagtccttttaaagtagggcataaagatcttaacataagaccctggcagt

SEQ ID NO: 4683 - DNA, 141 bp, Protomyxzoa rheumatica
gagggacaaacattcagaccctcgaagcagtgttctggaatccaatgtgtgggataaacattcagacaatagtagcagtgttctgtaatccaatgtgagggacaaacattcagaccctcgtcggaatgctttgaatcctat

SEQ ID NO: 4684 - DNA, 274 bp, Protomyxzoa rheumatica
ctgtttcctgaatgcattttcctcacctaggactccacaacaatggtacgatggtctgaatgtttgcccctgaagtaggattccagaaaacccgagctgtggtctgaatgtttttccctcacataggattccacaacacttctactggggtctgatttgtccctctcataggattccagaacactgctaagagggtctgaattattcaccctcacattggattccagaacactcctgctgtggtctgattgtttttcaccaacttaggattaca

SEQ ID NO: 4685 - DNA, 308 bp, Protomyxzoa rheumatica
ccacacatcacaaagcagtttcacagatagcttatttgtagtttttatctgagaatattctgttttaccccttaggccactatgggctccaaaatgtcccttcgcagattctccaaaaagattgtttacaacatggtgaattaaaataaggtttgaaatctgtgagatgaagccacacatcacaaagtagtttcacagagagcttcttggtagtctttactggaggatattcagtttttccccgtatgcctcaatgggttctgaaatgtccctaagcagattctacaaaaagaatgtttccaactatt

SEQ ID NO: 4686 - DNA, 269 bp, Protomyxzoa rheumatica
cgaataaattccatttgattccattccactctattccattctgttccattccactgcatgccattctattccattcctttgcattccattccatttcgtttgattacattccattcaatttcaaggcattcgaatcaattacatttccatccattacattcgagtgttttctattccagtccattccattccagtccattccatttgattaaattccattcgattcatttagatactattacattcctttcgattccattctatttgaa

SEQ ID NO: 4687 - DNA, 140 bp, Protomyxzoa rheumatica
agaaagtttgaagtctgtgagtttaaggcacacatctcaaggaactttttgagaatccttgggtctcctttttttgtgaagataccagctgccaacgaactcctgaaagagttccaaatatccacaagcagattctacaa

SEQ ID NO: 4688 - DNA, 133 bp, Protomyxzoa rheumatica
tcatcacaaacaagtttctcagaatgcttctgtctagttattatgtgaatatatatccttttacacttgaggccacaagcactccaaatatccacttacagattcgacaaaaagagtgagtcaaaactgctca

SEQ ID NO: 4689 - DNA, 128 bp, Protomyxzoa rheumatica
ttcaatcctggtgaatccatgggatcgatgataaggtgggaatcagagggaagagcaaaataaaggggagtgaaggtcttaggaacaaaatgcaaatataggcagaaaatcaagggggaagaggagtg

SEQ ID NO: 4690 - DNA, 150 bp, Protomyxzoa rheumatica
ttgtgacatatctttgcactgatcacccaggagatgtaacaactcttgtctaggctcgtcctacaggggctttgtgacatatttcttcactgatcacccaggtgatgtaacacttctttaggctgtgcctacaggggctttgtgacatat

SEQ ID NO: 4691 - DNA, 300 bp, Protomyxzoa rheumatica
cactcagaacccaacaacagtgttctggaatcctaagcgagggacaaaaattcagaccacagcaggagtgttctggagtcctatgtgagggactaacattctgaagacagcaggagtgttctgtaatcctacgtgaggaacaagcatttagaacacagctggagtgttctggaatcctatgtgagggacataaattcagacgacagcaggattgttctgaaactctgtgtgaggaacaaacatttagaccgctgcaggagtgttctggaatcctatgtgtgggacaaacattcagaccct

SEQ ID NO: 4692 - DNA, 282 bp, Protomyxzoa rheumatica
aaaggaaatatcttcacctgaaaactatacagagccattctgagaaacctgtttgtgatgtgtgcattcatctcacggaggtgaaactttctcttgattgagcagcttgaaacattctttttgtataatctgcaactggatatttggagagctttgagcctaaagtggaaaaggaaatactttcacatggaaactgcagaattattctgagaaactactttgtgatgtgtccattggactcatggagttgaacctagcttttgattgagcagatttaaatat

SEQ ID NO: 4693 - DNA, 148 bp, Protomyxzoa rheumatica
agagttgaacctttcttttgatgaggcagtttggaaacagttttttgtagagtctgaaaaggtatattttttatctctttgaggcctaaggtgaaataggaaatatcctcacataaaaactagacagaaaatttctgagaaacttctt

SEQ ID NO: 4694 - DNA, 213 bp, Protomyxzoa rheumatica
ctgtgcccacagggggattgagacatatctctgcactgatgccggggtgttctaactcttgcctggtctctgcctactggggttactgtgacatatctctgcaccaatctcccgggtgctgtaactttaatctaggctctggttacacggaattgtgacatatcactgcacccaagtgatataacttgtctaggctctgcctacagggttctc

SEQ ID NO: 4695 - DNA, 143 bp, Protomyxzoa rheumatica
tcaatcaatagaatggttcaactctgtgagataaatgcacacatcacaaaaaagtttctcagaaagtttatgtctagttttcatgtgaagatcggagtgcagtggaatgaaatggaatggaatggaaggcaaaggaatggaag

SEQ ID NO: 4696 - DNA, 128 bp, Protomyxzoa rheumatica
tcaatgattctattcaagtccattcagtaattgctttggattccattcgatgacgattacatttgattccatttgatgatgatttgatttgatacctttctatggttccattcaattccattcaatgt

SEQ ID NO: 4697 - DNA, 188 bp, Protomyxzoa rheumatica
cctccaatccactccattccattccactccattctattccattgttttgatggggtctcactctgtcacccaggctggtgtgcactggcacaatctcagctcatatttcatttcaccattccactccagtccattccattccagtgcgctccactccactccactcaattccattccactccactcca

SEQ ID NO: 4698 - DNA, 183 bp, Protomyxzoa rheumatica
ctatggtgaaaaaggaaatatcttcccataaaaactagacagaagtattcacagaaaatattttgtgatgtgtgtactcaactcacagatttgaacttttcttttggtagagcagttttgaatgactctttctgtagagtctgcaagtggatagttagctagctttgaggatttcactggaaa

SEQ ID NO: 4699 - DNA, 418 bp, Protomyxzoa rheumatica
cacataggattgcagagcactactgctgtggcctgaatggttgaccgtcacataggattccagaacacccctgctcttgtctgggtgtttgtccctaaaataggattccagaacactgctgctgcgttctgagtgtctgtcccttcacataggattccagaacagtgctgatatggtttgaatgtttgttcctccatagaattctagaacaatcctgctgtaatctgaatgtttgtctctcatacaggattccagactactactgctgtggtctgaatgtctgaccatcacataggattccagaacaatcctgctgtggtctgtatgtttgtccctcacataggattcctgagcactgctatgagggtctgaatgtttgtcccccacataggattccaaaacactcctgctgtgttct

SEQ ID NO: 4700 - DNA, 246 bp, Protomyxzoa rheumatica
gaccacagcaggagtgcgctggtatcctatgtgagggagaataattcaaaccctcgtgatagtgttctggattcctatgtgatggacaaatattcagacctcaataccagtgttctggaatcgtatttgagggacaaacactcagaccataacaggaatgttttggaatccaatgtgagggagaaacattcagactactgcaggattgttctgcaatcccatgtgaggcacaaacacccagaccac

SEQ ID NO: 4701 - DNA, 132 bp, Protomyxzoa rheumatica
caacagtgtgagatgaatgcacacatcacactatcctttctcagaatactcctgtctagtttttatgtgaagagatatcctttttcaccataggcctcaaagtgaatgcaaacatccctttgcagattctac

SEQ ID NO: 4702 - DNA, 141 bp, Protomyxzoa rheumatica
tgtagaatctgcaaaaggacattttggaacccattgaggcctactgggaaaaacaaaatatcctcagagaaaaactagaaagaaattaactgtgaaacttctttgttatatgtggattcatctcacagatttaagactttc

SEQ ID NO: 4703 - DNA, 175 bp, Protomyxzoa rheumatica
ataatattctgttgtgtgtatataccatattttctttgtcagtttgactcttagaagatatctggatttctttttaaattttttactgtaaatgatgctgctataaaatttggtttgaaagtatcagtgcagaagtgaataaaattttaaaacctgaacacatttctgcatgcag

SEQ ID NO: 4704 - DNA, 126 bp, Protomyxzoa rheumatica
atcagaaagttctacatagaattaccatatgtttcacaacaggtggaacagttccatatgttccaattacaggtgtatccaaaataattaaaaacaatgacataagctgcaaactctgcctctgtg

SEQ ID NO: 4705 - DNA, 189 bp, Protomyxzoa rheumatica
gtcttatcaatttcaagaatatatagctacatctagataggtcagactccagaatggatttttagcttttatccatgttttgccttttttcatcaatgaatcttttctcttcttaagtgctatacatctccttcacgtgatattagatataagcatttcaaaaataattttagactaaactgttcttta

SEQ ID NO: 4706 - DNA, 317 bp, Protomyxzoa rheumatica
tgtttgtccctcacataggattccagaacactgctacgatattctgaaagtttgttcctcacagaggattccacaacactgctgctgtggtctgaaagtttgtctcttgcattggattccagaacactgctatgagtgtctgaatgtttgtctgacacataggattccaaaacactcctgctctgttctgagtgtttgtccctcacataggactccagtataatcctgctgtggtctgaatctttgtccctcacatagcgttccagaacagtgctgctgggttctgagtgtttgttcctacataggactccggaaca

SEQ ID NO: 4707 - DNA, 260 bp, Protomyxzoa rheumatica
tgaggaaaaactgaatatccccagataaaaacttgaaataagctatctgtgaagctgctttgtgatgggtagattcatctcgcagaattaaaggttttctttgattcaacagattgcaaacactcttttggagaatctgtgaaggggcaatttttaacccactgaggcctaggggaaaaactggatattcccaggtgaaaactaaaaggaagctaactgtgaaacgtctttgtgatgtgtgaagttaaaacatacttttt

SEQ ID NO: 4708 - DNA, 164 bp, Protomyxzoa rheumatica
agtttctgaaaattattctgtctggtttttctatgaagatatttccttttataccttaggcctccatccgctctaaatatccacttggaaatcctacagagtatttcaaaactactatatcgaaaggaaggttaaccctgtgagttgaatgcacacatcacaaa

SEQ ID NO: 4709 - DNA, 123 bp, Protomyxzoa rheumatica
tagacagaaggtttctgagaaattgctttgtgaggtgtgcattcatctcacagagtttttccattcttttcattgagcagtatggaaacagtctttttgtagtatctacaaagacatatttgg

SEQ ID NO: 4710 - DNA, 150 bp, Protomyxzoa rheumatica
aatggaatgcactcgaatggaatagtctccaatggaaaggactctaatggaacgcaattaaatggaacggatttgaatggaatggaatccaatggaatggaatggaatgggattgaatgcattcaaaaggaattgaaaggaatgaaatgg

SEQ ID NO: 4711 - DNA, 132 bp, Protomyxzoa rheumatica
tgatgattccgttcaattccatttcataattccatttgattctattcgaggattccattcaataccattccaagatgattccatttgaatccatttgatgttttcattagagttaattcaatgattccattc

SEQ ID NO: 4712 - DNA, 212 bp, Protomyxzoa rheumatica
gaatggactggggtggaatggactcaaatggagtaggctggagtggaatggactctaatggaatggaatgaaaaggaatggaatggaacggaaagaaatagaatggattggagtcaggtggaacggaatggagtttaatggagttgaaaggaatagattagaatggaatggcaccaaatggaatggaatgcaatggactcgaatggaatgga

SEQ ID NO: 4713 - DNA, 81 bp, Protomyxzoa rheumatica
cttcatcctgcatccttacatggtggaaggcaaaagagtggcagtgaatgaatgcactcccagtccattcgagagggaaga

SEQ ID NO: 4714 - DNA, 153 bp, Protomyxzoa rheumatica
tcacaataggcatcaaagcgctccaaaggtccacttgcagattcaacaaaaagagggtttccaaactgctcaaccaaaggaaagtttcaagtatgtgagatgaatgcacacaccacaaagaagtttctcagaattcttctgtctagtttttat

SEQ ID NO: 4715 - DNA, 133 bp, Protomyxzoa rheumatica
atttggagcgctttgtggtatatggtataaaaggaaataacttcacataaaatatagacaaaagtaatctgagaaacttctttgtgttgtgtacattcatctcactgtctttaacctttcttttgattgagca

SEQ ID NO: 4716 - DNA, 184 bp, Protomyxzoa rheumatica
agcagttttgaaacactcttttgtagaacctgcaattgcatatttggactgctttgagatcttctttggaaacgggagtatcttcaaataaaaactagacataggtattgtcagaaacttctttgtgatgcgtgcgttccactcacagatttcaaccttccttttgatagcacagttttgaaac

SEQ ID NO: 4717 - DNA, 132 bp, Protomyxzoa rheumatica
atgttctatctaaaacttggagtcagctgatataaaagttttaactcttaagtggagatagggatgctatgtagcaagattgctgacctgcatgcatggcttaacacttgccttgcactgccttaaattgtg

SEQ ID NO: 4718 - DNA, 160 bp, Protomyxzoa rheumatica
ccacgccactttcgccgacatgctcgttcccctacagcatcccagctgacaccatggagagcctggcggcggaacgcagacttctagctctctttgccggcctcctggataggcctccgctcattgtgcaccccaactgacgtgcaagggagcccgctgg

SEQ ID NO: 4719 - DNA, 173 bp, Protomyxzoa rheumatica
gatgattccacatgattccatttgatgatgatacacttcgagtccattcgatgattccatttgattcccttcaatgattccatttcatgccattcaatgattcctttcgattccattccatgaccattccattccatttaagtcagtgataccattcggttccatttgatgat

SEQ ID NO: 4720 - DNA, 229 bp, Protomyxzoa rheumatica
gtgcattcaactcacagagttgaaactttcttttgattgagcagatttgaaacactctttttgtagaaactgtaagttgatatttggagccctttgaggcctattgtggaaaaggaaatatcttcacgtaaaaactacatagaaccattctgagatacttctttttgatgtttgcattcatctcacagtgttgaaactttcttttgattgagcagttttgaaacactct

SEQ ID NO: 4721 - DNA, 132 bp, Protomyxzoa rheumatica
ttggaaaacgtattaccttcatataaaatccagacagtggctctctcagaaactgctttgtggaatctgcattcaagtcacagagttgaacatttcctttcataaagcaggtttgaaacactctttttgtag

SEQ ID NO: 4722 - DNA, 127 bp, Protomyxzoa rheumatica
gacaaactttcagaccccagcaactgtgttctggaatcctatgtgaaggagaaatgttcagaccacagcatcagtgttctggaatcttaaatgaggaacaaacattcagaccacagcaggagtgttc

SEQ ID NO: 4723 - DNA, 205 bp, Protomyxzoa rheumatica
gagagacgaagaggaagggggcgagggggaaggggtgagggcggcgcgttttgggggctggctctccggacatctccaggaatcccgcgggaactggaagccgctctctgggctcccactagtcttcagcagggagaaaccggtctgggagggtggaggggagtaggcaactgaacctccgtgggagtctggagtgttctaggcc

SEQ ID NO: 4724 - DNA, 170 bp, Protomyxzoa rheumatica
gtgtggaactgaacctccgtgggagtctggagtgttccaggccctctctccttgaaggaggcagtgcctgtgggtgtcgctgttgccgggaaagtctcacaaacgcagacatgtggctctcgttaatttccacgtaggagacaagagcaagagaagatgcctccgcggcg

SEQ ID NO: 4725 - DNA, 155 bp, Protomyxzoa rheumatica
ttagaagagcagatgctaaacaccctttttgtggaatttgcagctggagaattcaagagctttgaggcctacagtaaaaaaggaaacatcttcttctaaaatctagacagaataattcacagaaacttctttttgatgtgggtgttcagctcaca

SEQ ID NO: 4726 - DNA, 138 bp, Protomyxzoa rheumatica
tgcagagttatgtcacaatgtcccattttggcagagccttaacaaggggtacatcacatgggtgatcagtgcagacatgtgtcacaagacccctgtagccagagactaggcaagtgttacatcagctgtgtgatcagt

SEQ ID NO: 4727 - DNA, 179 bp, Protomyxzoa rheumatica
agatatttcctttcttaccataggcctcaaaatgctccaaatatccatttacagactctacaaaaagagcatttccaaactgctcattcaaacgataggttcaactctgtgagaagaaagcacacatcacaaagtagtttctcagaaagtatatttcttgtttttatcagaacttattt

SEQ ID NO: 4728 - DNA, 207 bp, Protomyxzoa rheumatica
aaggaaatattttcacataaaaactagacagaggcattctaataaacttctttttgatgtgtgcattcatatcacagagttgaacatttctttcatttgagcagtttggaaacactgtttttggaggatctgcaagtggatattgtgagcactttgcagcctattttagaaaagaaagtatcatcacataaaatctaggcagaagca

SEQ ID NO: 4729 - DNA, 154 bp, Protomyxzoa rheumatica
ttctcagattgcttctgtctacattttatgtgaaggtatttccttttctaccatagaccacaaagggctcccaatgtccacttccagattctacaaaagcagtgtttcctaactgctcaatcagtagaaaggttcaactctgtgaggtgaacac

SEQ ID NO: 4730 - DNA, 248 bp, Protomyxzoa rheumatica
agcctcccagcagtattctggaatcctatgtgagggtcagacattcagacaatcgtagagtgttctggaatcctatgggagggataaacattcaaaaaacagcgagagcgtctgacatcctacgtttcggacaaacatgcataccctcgtcgcagtgttctggaatttatgtgagggagagacacacagaacccagcagcagtgttctggattcctatgtgacggacatacatgtagaccccagcagc

SEQ ID NO: 4731 - DNA, 144 bp, Protomyxzoa rheumatica
tgtttgaaagtgtctggcacctacccctttgctctctctctttcctgctccaccattgtccgacttgcttgcttccctttcaccttccaccatgactgtaagtttcctgaagcctcctagccatgcttcctgtacagcctatgg

SEQ ID NO: 4732 - DNA, 267 bp, Protomyxzoa rheumatica
ggaatcctacgtgagggacaagcattcagaccgcaacagcattattgtggaatcccaagtcagggacaatcattcagaccctcgtaagagtgttctggaattttgtgtgagagacaaacattcagacactcatagcggtgttctggaaagctatgtgagggagaaacattcagacaacagtaggcgtgttctggaatcccctgtgaggaaaaacattcataccctcgtagcagtgttctggaatcctatgtgatggacaaacattta

SEQ ID NO: 4733 - DNA, 158 bp, Protomyxzoa rheumatica
atgcttctgtgtagtttttatacgaagatatttccttttccaaaatagaccgcaaagcccttcacatattcacttctagattctacaaaaaaagtgtttcaaaactactcagtcaatagaaaggttcaactctgtgtggtgaatgcatttttctcaaa

SEQ ID NO: 4734 - DNA, 147 bp, Protomyxzoa rheumatica
aatgcttctgtctacttttatgtgaagatattccgtttccaatgaaatcctcactgctgtcattatatccgcttgtaaagtctacaagaagagtgtttccgaactgttgtatcaaaggaaaggtttaactctgtgagttgagtacac

SEQ ID NO: 4735 - DNA, 130 bp, Protomyxzoa rheumatica
tttcaccataggcctcaaactgctctggaatatccctttgcatattctacaaaaagagtgtgtcaaaactgctcttagctgtgtgagatgaatacacacgtcacaaataagtttctcaaaaagcttctgt

SEQ ID NO: 4736 - DNA, 166 bp, Protomyxzoa rheumatica
atttttttccagtccattcaattcgagttcattccattcctgtccattagatgtccttccaatcgattctattccatttcactccattccattccattccgttccaatcgattccatttcattctattcctttccatttcattccattccattcctttccattcca

SEQ ID NO: 4737 - DNA, 133 bp, Protomyxzoa rheumatica
tcacatctcctgcgtgatcagtgcagagataagtcacaattcccccttaggcagagcctagataagatttacataacctgggtgatcagtgcagagtgatgtcacaatgccctctgtaggcagagactagaaa

SEQ ID NO: 4738 - DNA, 145 bp, Protomyxzoa rheumatica
atggaatggaaatgaatggaatcgaatggaatcatatggaatgaggtgaagtgtagtggagtggagtgaaatgtagcagaatggagtggaatggtacgcaatgggaaggaatgaaattgagcagagtggagtggagtagagtgga

SEQ ID NO: 4739 - DNA, 181 bp, Protomyxzoa rheumatica
tggaatgcaatggaataaaatggtgaaatgaaatatgagctgagattgtgccatggcactccagccggggtgtgagagtgagatcctgtcaaaagaaaggaaaggagtggaaaggagtggaatggaatagaatggagtggagtggagtgcagtagagtggagtggaatggaatgggatgga

SEQ ID NO: 4740 - DNA, 139 bp, Protomyxzoa rheumatica
agatatttcctttttcaccataggcctcaaaggtctcaaaaatatccctttgcagattctaccaaagactgtttccaagctgctcaatgaaaagaaagattcaagtctttgagaggaatgcagacatcacaaagaagtt

SEQ ID NO: 4741 - DNA, 190 bp, Protomyxzoa rheumatica
tgattgttcttcaacttccaatttaccctcaaaattggaagattttctacccattcaaaataattgattttgactttttggaaagcagctcaaaaagagatttcttgactaagtaaaaattgatccatttttaggaagcttgtatttggatgtgtctgttggatgtacatatcattttttgacataccta

SEQ ID NO: 4742 - DNA, 346 bp, Protomyxzoa rheumatica
ccacagtacgcctcaaagcgctccaaatatccactcgcagattctgtaaaaagaaagattcaaaactgctgaatcaaaagatacgttcaacaatgtgagctgaatgcacacatcacaaataaggttgacagaatgcttctgggtagtttttatttgaagaaatttccctacccagaataggcctcaagtcgctctaaatatccacttgcagatcctacaaaaagagtgtgtcaaaactgctcaatcaaaagaaaggttctactctgtgagatggatgcaaacatcagaaagtagtttcgcagaattcttctgcatagtttttatgtgaagatatttccttctccac

SEQ ID NO: 4743 - DNA, 211 bp, Protomyxzoa rheumatica
aaatatcccttttcagattctacgaaaacagtgtttccaaactgccaaatgaaaagcaaggtttaagtctgtgaggtgaatggacatatcacaaagtggtttctcagatagcttccttctagtttttatcctgggatattcactttattccattggcctcaatgagtttgcaaatgtccatttgcacaatgcacaaaaacagtgtttccaa

SEQ ID NO: 4744 - DNA, 180 bp, Protomyxzoa rheumatica
gatgtgtgcattcacctagcagagttaaacctttcttttaatccagcagtttggaaactttttaaaatagaatctgcaaagggatattttgtaacgctttgatgcgtaaggtgaaaaaggaaacagcttcagttgaaaactagaaagaggatttctgggaaactgcttcatgttgtgtga

SEQ ID NO: 4745 - DNA, 144 bp, Protomyxzoa rheumatica
aaagggactttgtgacataactctccactgattatccaggtgattgggcttttgtcaaggctctgtctaagggggccttgtgacatatttctgcactgatcacacacgtgacggactcttgtcttggatctgcctgtgggggca

SEQ ID NO: 4746 - DNA, 177 bp, Protomyxzoa rheumatica
ttccattctgtactattgcattctgttcgattccattctacttgaataaattccattggagaccattcctatctagtccattccatctgagtccattccattcgagtccattacttttgtgaccattccaatatattccattaaattccattcgattctattccatgcgagtccatt

SEQ ID NO: 4747 - DNA, 172 bp, Protomyxzoa rheumatica
ccattccattcgattccattccattttattcctttccattgcattctattccattcaagtccattccattccagttcattccatttcactctattccgttccatttgtgtccattgcattccattccattcgagcccaatcctttccattatattccattcgagtctattcc

SEQ ID NO: 4748 - DNA, 131 bp, Protomyxzoa rheumatica
ataaaaactagacagaagcactgtgacaaactattttgtgatatatacattcatcccacagagttgaacatgcctcttgatagaggagttttgaaacactctttatgtagaatctgcaagtggatatttgt

SEQ ID NO: 4749 - DNA, 144 bp, Protomyxzoa rheumatica
tgagttgaatgcacgcatcaaaaatcactttctgagaatgcctctgactaattttaatgtgaagatatcccgtttccaatgaaggcctcaaagacctccaaatatctatgagcagattcgacaaaaggagtgtttcaaaaatgc

SEQ ID NO: 4750 - DNA, 130 bp, Protomyxzoa rheumatica
atatcttcacatagaaactagacagaagcattctcagaaatttctttggaatgtgtgtattcacctcacagatttgaacattccttttggtagagcgcttttgaatcacgctttttgtagaatctgcaag

SEQ ID NO: 4751 - DNA, 176 bp, Protomyxzoa rheumatica
aacgaatggaatcgaatggagtcatcgaatggaatataatggaatataatggaataattatccaatggaatcgattggaatcatcatcaaatggaaactactggagtcaacaccgaatggatttgaatggaataatcatcgaatggcatcgaatggattcgaatggaatcatcaac

SEQ ID NO: 4752 - DNA, 250 bp, Protomyxzoa rheumatica
aagaatatgtagacagtagctatgttggatttctgtggctatagagttgtttatttctctggtaatgtgtagagttattacaatgcagcatgacaactgtttctctgtaatagtgatccaacatgacgtgtagtattacacatggttgctaaaacaagaatatgtagacagtagctacattgggtttctgtggctacaagagttgttcatttctctggtaatgtgtagaattactaaaatgcagcatgac

SEQ ID NO: 4753 - DNA, 154 bp, Protomyxzoa rheumatica
cgattcgagtccattcagttacagtcgattgcttttgattccattccattccattccattcctctcaattccgttcctttctattcgattcaattccattccattgcattcaaatccattccatttgagaccgtacctttgcaatccattccac

SEQ ID NO: 4754 - DNA, 193 bp, Protomyxzoa rheumatica
cacataaaaactagacagaagaattctgagaaacttccttggaatgtgtgcattcatctcacagtgttgaaccattcttttgattgagcagctttgaacagtcgttttgtagaatatgcaaaggaatatttgtgagcccattgaggcctctgtggaaataggaaatatcttcacataaaaactagacagaatc

SEQ ID NO: 4755 - DNA, 125 bp, Protomyxzoa rheumatica
tgaaaatggattaaagacttaaatgtaagacctaaaatcataaaaacttacaagaaaacctaggcaataccataggcttggacaaagccttcatgactaaaacaccaaaagcaatggcaacaaag

SEQ ID NO: 4756 - DNA, 150 bp, Protomyxzoa rheumatica
tgtaatggaaagataccgagtgtaatgaaatggaatggaatggactcgaatgcaatggactggaatggactcgaatgcaatggaaaggaatttgatgcattcaaatcgaatggaatgtaacggtatggaatggccccgtatggaatgtaa

SEQ ID NO: 4757 - DNA, 130 bp, Protomyxzoa rheumatica
attcattttacagagttaaaactttatttgattgagcagtttcgaaactcactttttgtagcatctgcaagcgtacatttgtagcactttgcatcttgtggtagaaaaggaaatatcttcacataaaatc

SEQ ID NO: 4758 - DNA, 127 bp, Protomyxzoa rheumatica
ctcccagctcagccttccgagtagttcagactacaggtgtgccaccacacctggctaattaaaaaaaatttttttcttttgtagagatggggtcttgacatgttgcccaggatggtctcgaactcct

SEQ ID NO: 4759 - DNA, 141 bp, Protomyxzoa rheumatica
gaatcatcaatgaatgttattgaatggtatcatcgaatggactcgaatggaatcattttccattggcatcgaaagggatcaccgaatggactcgaatggaataatgttcgaaaggaatcgaatggaatcttcaaatggaat

SEQ ID NO: 4760 - DNA, 340 bp, Protomyxzoa rheumatica
ggagtggagtggagtggagtggagtggagtggaatggaattgaatggaatggaatggagtgcagtggagtggagtgcataggagtggaatgaaatgggatggaatggaattgaatggaatataatggaatggaatgcaatggaatgtaatggtgaaattaaatgtgagctgagatagtgccactccgcgccagcctgggtgacagattgagatcctgtcgaaagaaaggaatagaaaggaatggaatggaatggagtggaatgaaatggaatggagtgtggtggagtggagtggagtggactggatttgagtggagtagaatggaagggagtggaatgga

SEQ ID NO: 4761 - DNA, 150 bp, Protomyxzoa rheumatica
cactccactctactccacttcactgcatacctttccattccattaaaggcctttcgaatccgttcctttggaatcctttcgattccattggattcataattttcgttcgattccatttgatttgatatccttccatgcgattccattcca

SEQ ID NO: 4762 - DNA, 247 bp, Protomyxzoa rheumatica
acaaaaagagtatttcaaaactggtccattaaaagaaagcttcaactctgggagatgaatgcacacatcatgaagaagttattcagaatgcttatgtctagtttatttttgaagatatttccttttccaccatcggcctcaaagccctccaaatgtgcacttgcagattacacaaaaagagagtttgaaaactactcaatcaaaagaaaggtttaactctggaatatgaagacacacatcacaaaga

SEQ ID NO: 4763 - DNA, 158 bp, Protomyxzoa rheumatica
aagatcctacaaaaatagtgtttccaaagtgatctatcaagacgaatgttcaacaccattagttgaatgtaaatatcacatagtagtttctgacaatgcttctgtctagtttttaattgaatatatttccttttctaccgtagtcctcaaaccgctat

SEQ ID NO: 4764 - DNA, 129 bp, Protomyxzoa rheumatica
ctgttctgcaatcctatgtgaggaacaaacttttagacccagggagcagtgttctggaaccgcaagtgagagacaaacacttggaaccctacagcagtgtcctggaatcctaattgagggacaaacata

SEQ ID NO: 4765 - DNA, 268 bp, Protomyxzoa rheumatica
tggcagatccatcagtaaaccaagcatgtttctgatgctttggatgaggcaggtctctttccctgcctgcaggacttgttcggtggctttctgagttggcaaattttttaaaaacgataccccctttggtcctggctttgccctatcttgtatataccattccattatgtgatgctactttcttcagcatgccctattcgatgggttttggtggacctcatgacccaagtcataataggaatttcaggccttatgaagacatcatggt

SEQ ID NO: 4766 - DNA, 261 bp, Protomyxzoa rheumatica
gacatcttcccggtttgggtaacatctcacaacctctgtatgcagtcactagaaaatataatgactttcactggaggtagaaagagaacacagcctttgagcaagctaagcaagcagtgcatctggccctggatggcccatatgggatgggaccgtagaattgcaaacaactgtcctggattaacatgctaattggagcctttggcagaaacaagatgggaagaggggactcttggggtttcaaacctggaagctgccaga

SEQ ID NO: 4767 - DNA, 143 bp, Protomyxzoa rheumatica
aaaactagacaaaagcattctgagaaacttctttctgatctgtgcattcatctcacagagttgaagctttgttttcattgagcagttggaaacactcgttttgcagaatctgcaagtggatgttttgagagctttgaggtcta

SEQ ID NO: 4768 - DNA, 123 bp, Protomyxzoa rheumatica
ggagtggaatggagtagagtggaatggagcataatggagtggactcgaatgcagttgagtttagtgaaattcagtggagtggactggaagcgaatggagtggagtggagtggaatggaatgca

SEQ ID NO: 4769 - DNA, 518 bp, Protomyxzoa rheumatica
gtttttatttcaagatatttccttttcctccataggctgaaaagggctccaaatatctacttgcagattatacaaaaagagagattcaaaactactgaatcaaaaataggtttaactctgtgttatgaatgcactcatcacaatgaagtttctcagaatgattctgtgtagtttttatatgaagatagtttcttttattcaatagacctcaaagcactccaaatatccacttgcagtttctacaaaaagagtgtctcaaaactgctcaatcataagatgggttcaactctgtgagaagaatgcacacaccacaaggaattttctcagactgcttctgtatagtttttatgtgaagatacttacttttacaccataggcttcaagactctccaaatatccacttgcagattctacaaaaagagtgatgccaaactgctcaaacaaaagaaatgtccaacactgtcagataaatgtacatatcacaaagaacttcctcagaatgcttctgtgtaattttt

SEQ ID NO: 4770 - DNA, 231 bp, Protomyxzoa rheumatica
agagagtttcaaaagtgctcaatcaaagaaatgtttaattctgtgagatgaatgcacacatcacaaagaagttcctcagattgcttctttctagattttaagtgaagttctttccttttgtaccatcagcagcaaatcgctgcaaatgtccacttgcagatactgaaaaaatagtgtttccgaactgctaaatcaaaagaaactttcaactctgcaagatgaatgcacaca

SEQ ID NO: 4771 - DNA, 181 bp, Protomyxzoa rheumatica
cttttgattgaacagttttgaatctctctttttgtagaatgtgcatttggatatttggagccctttgcagcctattttggaaaaagaaatatcttcagagtaaaactacacagaagaattctgagaaatatctttgtgatgtgtacactcatgtcacagagttgaaactttctttcgattg

SEQ ID NO: 4772 - DNA, 479 bp, Protomyxzoa rheumatica
ggaaacccaaacaattcctttaagtagaaagtaaataaattaagagagcaatttaaatggctttttttcttttttccctttttattttcatgatgtaaaaggttagacaggaatgcactgcaaatgtggagatctgcgtcatctttctgctgcccaaggctatcccagtaagttcctcctgagtaaatctttgactatctaccagcctggaatggtctatctctttctttggtctgagagcttcctctccattatgtagaatagctcagttctgacagggagttttcctaacatttttctacactgactagaaaaatagagagaagactcaagtaactaaaatcagaaaagaaagaggatatattactagcagcattgcaaaaagaaaaatacatttaaggaaaaataatatgaacaatggtaggccaatatattagataacttagatacaatggaaaaatttctagacacaaaccagt

SEQ ID NO: 4773 - DNA, 238 bp, Protomyxzoa rheumatica
aaagtgctaggattacagtcatgagccaccgcacctggcctctctgtttgcttgtattttattgaagagttttgcatctgtattcataagatatattggtctgaatttttctttcctcgtgatgtctttgtatggctttgctatcatggtaatactggcctcatagaatgagttgagacatatctctaccacttttatcttttggagagtttggaaagaattgatcctaaatcttctt

SEQ ID NO: 4774 - DNA, 307 bp, Protomyxzoa rheumatica
gcagtttacacagaaggcagctaggtttcttccatcatacccaggcaattgtctaagcttgtcatcaccaatatctgttgttatatgatgttctatctttgttaagtaaatattcctgcagggcattatatttggtaagaaccttataatagagacaccctgaaaagggagggccctcagggaatgtttagggttgaactgttccatttagcagcctttctttcatcctgatatatgccatacaaaaaaaaatgtgagctctgtctgcaggaaaattggtgaggtttgcagggaactgggagaagtc

SEQ ID NO: 4775 - DNA, 179 bp, Protomyxzoa rheumatica
cactctgctcaattccattccttcccattccattccactcctttccaatgcaatacactccagcccattctattccattccactccattccattccactccattccagtcctctccactccacttaaccgcaatccattcaatgctgtttgattccattccattcttttccattccact

SEQ ID NO: 4776 - DNA, 147 bp, Protomyxzoa rheumatica
tgtgagatgagtgcacacatcataaagaagtttctcaaaaagcttctttctagcttttatccaaagatatttcctttttcaccatatgcctcaatgtgctccctaatacaactttgcagattctacaaaaacagtgcttccaaactg

SEQ ID NO: 4777 - DNA, 134 bp, Protomyxzoa rheumatica
atcacagagttgaacctttgttttgatttagcagttttgagacaatctttccgtagaatctggaagtaaatatttggagggctttgagttctgttttggagaaggagatatcttcatataaaaactacacagaa

SEQ ID NO: 4778 - DNA, 132 bp, Protomyxzoa rheumatica
atagcttctttctagtttttatcacaggatattagctttttcatcactggactcaaagaactcccaaatgtccatttgcagacaaaaaatagtgtttccaaagtgctgaatccaaataaaggtttaactctg

SEQ ID NO: 4779 - DNA, 509 bp, Protomyxzoa rheumatica
tagatgtgttatttatcatttttttctcttactgctttatttttcttcattgattttgtagtgacatgattcaatttctttctcatttgcttctgcataccatctacaggtttttttgtaatcatcttgagaaataaagacttcataaaacatcttaaagttatgacaatatataatgactatatttcaatggaatgcaaagctgtacctctttatacccccactttgttattaatatcacttgttatcttttcttattgagtatctatgaacccaaatttatgcagctttctgcttcattttttaaattccacagcaataacgtgaaagttttgtgcaccatcattatgacagtagaggtttctatagctatttatgtatttacctttaatagagagctttctattttcatatgcttctatgacgctgtgcggcatatattgtcatttttggacgtgatagactttcttttacatttcctttagcactgttccagtggttagtaacac

SEQ ID NO: 4780 - DNA, 168 bp, Protomyxzoa rheumatica
gaattgtgagagatctcgccactgttcacgcaagtgatgtaactattatctaggctttgcctatagaagtctttgtgacatacctttgcactgttaacccagatcgtgtaactcaactaagttctgccttcaggagctttgtgacatatctctgcactgatcacttag

SEQ ID NO: 4781 - DNA, 244 bp, Protomyxzoa rheumatica
caagcaaacattactgcctgcactctgcctcctgtcagatgaatggcagcattaaattctcataggagcatgaaccctattgtgaactatgcatgtgagggatttaggttgcctgctccttatgataatctaatgcctgatgaacagcttcatcccaaaaccatcccccctcacaccctggtatatggaaaaattgtctttcacaaaacctggtgccaaaaagtttggggatcactgctctaga

SEQ ID NO: 4782 - DNA, 175 bp, Protomyxzoa rheumatica
gcagattctacaaaaagagtgtttcaaaagtgttcaatcaaaggaaagtttcacctctctgtgatgaatacattcacaacgaagaagtttctctgaatgcttttgtgtggtatttagttgaagatatttccttttacaccacaggccacagagatctccaaatatccacttgcag

SEQ ID NO: 4783 - DNA, 136 bp, Protomyxzoa rheumatica
ccattccattccattcccttccattccattccattctatttcattccattccacttcaatccactgcaatccactccactgcagtccacttcactccattctactcctttcaattccattccttcccattccgttc

SEQ ID NO: 4784 - DNA, 150 bp, Protomyxzoa rheumatica
tagtttttatgtgaagatatttccttttccaccataggagtcaaagtgctacaaatgtccacctgcagattatataaaaagagagtttcaaaactgcacaatcagaaggaaggtttaactgtgagatgaatgcacacatcacaaggaagt

SEQ ID NO: 4785 - DNA, 158 bp, Protomyxzoa rheumatica
caaactgctcaatcaaaagaaagtttcaactctattagatgaaagcactcatcacaaagaagtttctcagattctatctagttttatgtgaagttatttcgtttctcaccattggtctcagcagattctacaagaacagaatttccaatctgctcaat

SEQ ID NO: 4786 - DNA, 127 bp, Protomyxzoa rheumatica
atgatgattcctttcgatttcattcgatggttcaattctattccatgcaatgatgattccactctgtttcattccatgattccattcgattacattcaatgatgatttcattcctttccatttgatg

SEQ ID NO: 4787 - DNA, 165 bp, Protomyxzoa rheumatica
tatttggatagcttcgaggatttcgttggaaacgggattatcttcagataaaaaggagacggaagccttctgggaaacgactttgtgatgtttccattcaagtttcagagttgaacattcccattcatagaacaggtttgaaacactctttttgtagtatctgga

SEQ ID NO: 4788 - DNA, 199 bp, Protomyxzoa rheumatica
acaggccaaattctactgctaaacattgaagcaatgaggattatcaccccttcactaattaattaggtcttatataataagttttatttatttgaagtcatgttgtaatttatgttggatcatatttgataatttatcaagatggggaggctaggtgcgatggctcacacctgtaatcccagcactttgggagtccgag

SEQ ID NO: 4789 - DNA, 170 bp, Protomyxzoa rheumatica
gaagatacttccttttccactagaggtcacaaagcgctccaaatatccacttgcagattttacaaaagggtgtttctaaagtgctaaatcaaaagaaagtttcaagtctgtgagatgaatgcacatatcccaaagaagtttctcagaatgcttctgtctagtttttatgt

SEQ ID NO: 4790 - DNA, 145 bp, Protomyxzoa rheumatica
gttttgtttgagcagttttgaaacaccatttttgtagaatctgtaagtggatatttggagtgctttgttccctatggtagaggaaatatcttcacataaaactagacagaagcattctgagaaacttctttgtcatgtgtgcatt

SEQ ID NO: 4791 - DNA, 200 bp, Protomyxzoa rheumatica
ggactcgaatgtaatggattgcaatgtaatagcttcgaaaggaatggaattgaatggaatgtaatcaaatggaatggaatttaatacactggaatggaatggaatggaacggagtggattcgagtggaatggaatcgaatggaatggaatcgaatgaatgaagtcaaatggaatgaacaggaaaaatggatttgaatgga

SEQ ID NO: 4792 - DNA, 171 bp, Protomyxzoa rheumatica
gttcaactctgtcagatgaatgcacacataaaaaagaagtttctcagaattcttctgtctggtttttatgtaaagatatttccttttccaccttaggcctcaaagttctcccaatgtccaattgcagattgaacaaaaagagagtttcaaaactgctcaatcaaaagaaag

SEQ ID NO: 4793 - DNA, 143 bp, Protomyxzoa rheumatica
aatatccacttgcagattctgcaaaaagagaggttcaaaactgctcaattgaaacatagttccaactctgtgagttaaacgcacacatgacaaagcacattctcagaatacttctgtgaagtttttaggtgaagatattttct

SEQ ID NO: 4794 - DNA, 141 bp, Protomyxzoa rheumatica
gttccttttgagtccattctatttgagtcaattccattcgagtctattacatttgggagcattccattcgattgcattccattccattagatgcctatcctttccattgtattccattcgaatctattccattccattcct

SEQ ID NO: 4795 - DNA, 123 bp, Protomyxzoa rheumatica
ttctttggaaaagggaacatcttcacataaaaagagacagaaatattctcagaaacttctctgtgatgtctgtacacaactcacagtggtgaaccttccttttggtagagcagttttgaaaaa

SEQ ID NO: 4796 - DNA, 127 bp, Protomyxzoa rheumatica
agagtgcccaaagaaagatgaatagagaaatgaaacctgagtaggaccttgaaggacgggtataataaataataaaaacgacgacccacgcagagcacacagcaccacagctgccacgatccgaaca

SEQ ID NO: 4797 - DNA, 197 bp, Protomyxzoa rheumatica
ggacaagcattcagaccctcgtagcagtgtactgtaatcctatgtgagggacaaacattcagaccatagcaagattgttctggaatcctatgtgaggaacaaatattcagaccaggacagcagtgttttgtaatcctgtctgaaggacaaacattgagacccttgtagctgttttctggaatcttatgtgaggaaca

SEQ ID NO: 4798 - DNA, 166 bp, Protomyxzoa rheumatica
agtggagtggagtggaatggaatggagtggagtggagtgaaatggaatggaatggagaaatgaaatgtgagctgagattgtgccacagtgctccaggctaggtcacacagtgatatactctcgaaagaaaggaatggaatggaatgcagtggaatggaatggaatg

SEQ ID NO: 4799 - DNA, 173 bp, Protomyxzoa rheumatica
gtcagggacagtcattcacaccacagctaaggtgttctggaatccaacatgtgggacaaacattcagaccctcgtagcattgttctagaatcctatgtgagggagaaacattcagaaaacagcagaagtgttctggagtcctatgtgcgggacaaactttcagaccctcgtag

SEQ ID NO: 4800 - DNA, 160 bp, Protomyxzoa rheumatica
tccctcacataggattccggaacactgctacgagggtctaaatatttgtccctcacataggattctggaacactccttttgtagtctaaatgtttgctcctcacataggatttcagaacatgcctgctgtcctccgaatgtttgtccttcacttaggatt

SEQ ID NO: 4801 - DNA, 162 bp, Protomyxzoa rheumatica
cagcagcttggaaacactgtttttgtccattccatgaatggacacttgggagctcattaaggcaaaaggcaaaaaagtgaatatcctagggtaaaaactggaatgaagttattagagaaactgctttttttatgggtccatcacgtcgcagagttaaacctt

SEQ ID NO: 4802 - DNA, 122 bp, Protomyxzoa rheumatica
ttgggatagtttactatctgcagcgcatttgggatagtttgctatccgtagtacatttgggatagtttactacctgcggcacatttggaatagtttactatcttcagcacatttgggatagt

SEQ ID NO: 4803 - DNA, 185 bp, Protomyxzoa rheumatica
tctacaaaaagattgtttcaaaactgctgaattgaaagaaagcttcaactctgtaagatgaatggacattccacaaagaagttcctcaaatgcttctgtctagcttttatgtgaagaatcttccttttccaccataggccacaaagcgttccaaatacccacatgcagattctgcaaaaagagtg

SEQ ID NO: 4804 - DNA, 154 bp, Protomyxzoa rheumatica
tatgtttctccctcacataggattgcagaacattcctgctgtggtctaagtgtttgttcctcaagtagtattctagaacactgctactggggtctgaaaatttgtccctcacataggattccagaacattgctaccagggtttgaagtattttc

SEQ ID NO: 4805 - DNA, 275 bp, Protomyxzoa rheumatica
gagcagttttctggaatcctttgtgagggacaaacatttagagaacccagtagcagtgttctggaaccctatgtgagggagaaacaataagaacccagcagcagtgctctcgaaacctatgtgagggacaatcattcagaccacagctgtggtgttctggaatcctaccagtgggacaaccattcagacccttccattgttatggaatcctatgtgaggaaaatacattcataacacagcaggagagttcttgagtcctatgtgtgggacaaaca

SEQ ID NO: 4806 - DNA, 140 bp, Protomyxzoa rheumatica
acttttcttttgacacttcagttttgaaactctctttttgcaatatctgtaagtgttcatttggagagattcaaagcctatggtggaaaaggaagtatcttcacataaaaactagaccgaagcattctcagaaactcctt

SEQ ID NO: 4807 - DNA, 161 bp, Protomyxzoa rheumatica
agtttccgggaatgttgctgcctagtttttaagtgaatatacatccttttcaacagtaggactcgaatcacttgaaatatcctcttgcagatactacaaaaatactgtttcaaaactgatctctccaaaggaatgtccaaccctgtgagttgaatgcacac

SEQ ID NO: 4808 - DNA, 138 bp, Protomyxzoa rheumatica
acttgcagattctacaaaagagagtttcaaaattactcaatgaaaataaaggtttaactccttgagacgaatgcacacatcacaaagaagtttgtgagattgcttttgtctagcttttaagtgaagatatttcctttt

SEQ ID NO: 4809 - DNA, 152 bp, Protomyxzoa rheumatica
ttttgtataatctgcaagttgatatttggttccttttgaggcatatgttggaaaacgaaatatcttcccataaaagctagacagcattctcagaatcttctttgtgttgtgtgcattcaacttccagggttgaacctttcttttgttagagc

SEQ ID NO: 4810 - DNA, 885 bp, Protomyxzoa rheumatica
ggaacaaatgttcagaccttcatagcagtgttctggaattctatgtgacggacaaacatttagaccccagcagcggtgttctgaaatcctatgttagtgacaaacattcagacccttgtaggaatgttctggaatctatgtgagggacttgctttaagaccacagcaggagtgttctggaatctcatgtgaggtacaagcatttccaccctcatagctgtgttctggaatcctatgtgatgaacaaacatttagaccccagcagcagtgttctggaatcctacgtgagggaaaaacatacagaccatcatagcagtgtattggaatcctgtgggagggacaaacattcagacaatcgaagcagtgttctggaatcctaagagagagacaaatattcagaacacagaaggattgttctggaatcctatgtgaggaacaaacactcagaacacagcaggagtgttgtggaatcctatgtgagggacaaactttgagaccctcgtagtagtgtcctggaatcctatgtgagggacaaacatgcagacaattgtagcagtgttctggaatcctatgtgatcgacaaaccttcgaacaacagtggaagtgttctggaatcctatgttatggacacacattcagaaccttgtggcagtgttctggaattctatttgagagagaaacattcagagcccagcagcagttttctggaatcctatgtgatgaacatacatgcagaccacagcagcagtgttctggaatcttatgtgagggactcacattcagaacctcgtagcagtgttttggaatcctatgggaggacaaaaaatcagacactcctactagtgctctggaaacctatgtgagggacaaacattcagaccacagc

SEQ ID NO: 4811 - DNA, 146 bp, Protomyxzoa rheumatica
aggctctgcctactgggggcattgtcacatatgtttgcaccgatcacccaggtgacattattgattattgtatttgcctataggggcattttgagatatctctgccctgatcacccaggtgatgtaactctggtctaagctctgcc

SEQ ID NO: 4812 - DNA, 151 bp, Protomyxzoa rheumatica
actctaaatgtccacttgcagattctacaaaaaaagagtttcaaaactcctctattaaaagaaaggttcaactctctgagttgaatgcactcattacaaagaagtttctggaaatgcttctgcgtagtttttatgtgaagatatttccttt

SEQ ID NO: 4813 - DNA, 176 bp, Protomyxzoa rheumatica
aatggattccatttgatgattatcccattcgagtccgtttgatgattccattcaattccatttgatgatgagtccattcatgtccattgcatgattccattcgatgatgattctattcaattcctttccataatgattccattcaattacattcaatgatgattccatttgatttc

SEQ ID NO: 4814 - DNA, 122 bp, Protomyxzoa rheumatica
tggaatggactcaaatggaatggactggaacaaaatggaaacgaacggattgcaatcgaatggaacggaatggaagggaatggacttgaatggaatggaatctaattgaatggaaccaaatg

SEQ ID NO: 4815 - DNA, 135 bp, Protomyxzoa rheumatica
gaatatattgattaagaataaattttagccatgcacatcttttacaaacttcatgatatactttgctatatttaaatttcttatactcttataaaatgtgtgttctgatctcacattggcttccatttcttccct

SEQ ID NO: 4816 - DNA, 163 bp, Protomyxzoa rheumatica
aatcaacccgagtggaatggaatggaatggaatagaatggtatggaatcaacccgaggggattggtatagaatgtaatggaatggaataaaatgtaatggaatgcaatggaataaacccgaatagaatggaatgcaatggaatggaatggaatcaacccgagt

SEQ ID NO: 4817 - DNA, 268 bp, Protomyxzoa rheumatica
ggattccagtacactgcaatgagggtctggatgattgtgcctcacataagattacagaacactgctgctggggtctaaatttttgttcttcacatagaattgcagaacactaataagagagtatgaacacttgttcctcaaaggggattccagatcactcctgatgtagtctcaatgtttgtccctcacacaggtttccagaacactgctacgagggtttgaacgtttgtccctcaaacagaattccagaacactgctacgagtttct

SEQ ID NO: 4818 - DNA, 362 bp, Protomyxzoa rheumatica
cttattagtgttttactctctgctctttctggctccttatagttagaagtgatatccttgaaatgcatggggctaagaagggagctggaacttaaagtgggagtgtttgtccaaggtgacaggtgctcttgctctgtcagtatccagttgatttatattgatattgaattcaactatattgttactaatttctgcctgctagatctgtttctgatggagggtgctgatgtctcaaattgtgacagtggatccatctatttctccttccagttctgtttttgccttacgtcctttgaaaatcagctgtcaggtgcatacacattaaggattgtcatctttttggaggattaactgttatgtca

SEQ ID NO: 4819 - DNA, 144 bp, Protomyxzoa rheumatica
ggctgaggtgggtgggtcacttgaggtcagaagttcaaaaccagtctggccaacgtggtgaaaccccgtctgtattacaaaaaatacaaaaattagctggacgtggtgggcacatgtaatcccaactacttgggagggtgaggc

SEQ ID NO: 4820 - DNA, 123 bp, Protomyxzoa rheumatica
tgagaaatcacgtttcaaacgaaggctaaaaagaggttccaatatacacttgcagattctcaaaaaagtgtttcaaaactgccctatcattaggaatgttcaactctgtgagttgaatgcaaa

SEQ ID NO: 4821 - DNA, 161 bp, Protomyxzoa rheumatica
atataggcataatgctggatgcctgtagtcctggctactctggaagctgaggctgaaggattgctcaaacacaggagtttgacagtgcagtgagtgatgatcacaccactgcactccagcctggccaacagagagcctatctctcaaaaaaaaagaggaat

SEQ ID NO: 4822 - DNA, 160 bp, Protomyxzoa rheumatica
agattctatcaaaactgctctatcgaaaggaatgttcaactctgagagttaaatgcacacatcacagagaattttcttagaattcttttttcaagttttatatgaagaaatctcgtttccaaagaatgcctcaaaaaaggccaaatattcacttgcagat

SEQ ID NO: 4823 - DNA, 211 bp, Protomyxzoa rheumatica
gtcccgtggtggaaaaggaaatatcttcacacaaaaacaagacagaaacattcttagaaacttctttgtgatgtctgcattcaactcacagaggtgaacatacctgttcatagaggagttctgaaacgctctgttcgtaaaatctgcaagtggatatttgtactgctttgaggcattcgttgcaaacgggaatatcttcacatataagcta

SEQ ID NO: 4824 - DNA, 176 bp, Protomyxzoa rheumatica
gctcaaagaaaagaaaggttcaacttcgtgagattaatggactcatcacaaagtagtttatcagaatgcttctgtgtcatttttatgtgaagatattttctcttccacattaggcctcaaagtgtttcaaatatccacttgcttattctattaaaagagagtttccaaactgttca

SEQ ID NO: 4825 - DNA, 210 bp, Protomyxzoa rheumatica
acactgctacgggggtctgaatatctgtttctcacaggggattaaagaacactcctgctgtgttctaaatgtttgtccctcacacactctatcagaacactgctatgagggtctatatgtttttccctcacacagaattccagaacaatgttactagggtttgaatgatcgtccctcacataggattccataacactgctgctgggttct

SEQ ID NO: 4826 - DNA, 235 bp, Protomyxzoa rheumatica
ttccaccccattccattccactccattccactccactccagtgtacttcaccccattctatttgatgccatttgattccattcgattccattcgatgccattcgatttcattccatttgattccattacatttgattccaatccattcgactccattccatttgataactttggattagattccataccattcgagtctattccattccattccattccattccattccattcca

SEQ ID NO: 4827 - DNA, 126 bp, Protomyxzoa rheumatica
gaatggaatggagtcgaatggaatggaatcgaatgaaatggaatcgagtggattggaattgaatggaatcaaaatgatttgaatggaatggagtgtaatggatagatatcgaatggaaaggaatgg

SEQ ID NO: 4828 - DNA, 200 bp, Protomyxzoa rheumatica
ccattcggtgattccattctagtccattcgataattccatttgagtcgattcgatgattgcttttgattaaatttgattatattcaatttgagttaatttgttgatgccattcgattctactctatgatgattccattcgtgtccattcggtgattccattcaatttcattcaatgatgattccttaggagtctattaga

SEQ ID NO: 4829 - DNA, 162 bp, Protomyxzoa rheumatica
gaatggtatggaatggagtgaaatgcaatagaaaggatttgaacaaacacgagtggagtggagtttaatggagtggaatggaatggaatggagtggaattcagtcaacccgagtgtaatggaatgcaattgattacccgagtggaatggaatggagtggaat

SEQ ID NO: 4830 - DNA, 194 bp, Protomyxzoa rheumatica
ctgctaatgagactgatccttgagaggattataacaatgagcctgagagctttgcatgttcatttttctcctgctggaaagatcaaggagctcttaaaattaatgttgagggttggatgagtccaaagcactagaagttcacctctgtgagatgaatgcacatatcacaaagaagtttctcagaatgcatctgt

SEQ ID NO: 4831 - DNA, 129 bp, Protomyxzoa rheumatica
actaggctctgcctacggggcatagggtcatatcactgcatggatcaccgtggtgatgtaacccttgtccatgctcttcgtatagggggccttgagacatatctctgcactgatcatctaggtgatgta

SEQ ID NO: 4832 - DNA, 277 bp, Protomyxzoa rheumatica
caagtagatatttggagccccttctggcctatggtggaaaaggaaatttcttccaataaaaactacacagaagcattttgagaaactcttttttgatgtgtgcattcatctcaaagtgttgaaaatttctttcgaatgagcagttttgaaacattgtttttgtagtatccgcaagtggatatttggagagctctgagaccttctgcggaaaaggaaatatcttcacataaaaactacacacaaccattctgagaaacttctttgtgatgtgtgcaat

SEQ ID NO: 4833 - DNA, 325 bp, Protomyxzoa rheumatica
aattaaacctctttcctttataaacaactcagcctcagatatttctttacagcaacatacaaatgttctagcagagtctctacctccctgcatatgcacatggtttactatggcacacatatttctattcaatgctctattcccaaacaagagtattttctttcttttagagagactctgtttcctgtgtaggttgatggttccagctgatctcagaaatactggaaaagacaagcaaaactgtggcagatcaggtctcattaacagttgaacaggaaggactccatgacaagagcttccacactgactgaactggttaggttaa

SEQ ID NO: 4834 - DNA, 295 bp, Protomyxzoa rheumatica
gcattttcctaaggacaaaagtgactgattccacctaatctataactaagttctgggtcctggagaccttcctccggagcctcagtaagtttgcctaatctagatggggtcctggtgctggaggtgattactgttatcttgtctccagctaaggtgtggaggtctgggggagtttcttcagacatccaacagaagtttttaatcctaaatgcatcctggtgtgaagaatgtaagaaattctttgttatcttgttgcgcttcaaggcccaggaaaggcctaggccagactttttgt

SEQ ID NO: 4835 - DNA, 131 bp, Protomyxzoa rheumatica
tgaatccattccattgctgtctattccgttctattccattcctttggagtcctttgcgtcctattataatcccttccattccattccattcctatctttccattcttctccataccattccattccactcc

SEQ ID NO: 4836 - DNA, 285 bp, Protomyxzoa rheumatica
cacataggattccagaacactgctgctgggttataagtgtttctccctcacatggaattccagaatactgtgataagggtctgaatgtttgtccataacataggattcaagaacactaccgctggtgtctggttgtttgtcccacacatagtattccgggacactgctacgattgtctgaaggtttgtcactcacataggattccagaacacttctttgagggtctgaatctttgtccctcacataggattccagaacactgctgctggtgtctgaatgtttgtc

SEQ ID NO: 4837 - DNA, 153 bp, Protomyxzoa rheumatica
ctttttcaccataggactcaaagcgctcgaaatgtcctcttccaggtattgcagaaagagtgtttcaaacctgctctatgaaaggaagtgttcaactctactgggatgaatgcaaacatcacagagatgtttccgagaatgcttctgtcttga

SEQ ID NO: 4838 - DNA, 150 bp, Protomyxzoa rheumatica
attccacacgggttgattccgttccattccattccattgcactccattgcattccattgcttttcattccaatttaatccattccattgcattaactgccattccagtcaactcggtttgattccattccattccattgcattccattgc

SEQ ID NO: 4839 - DNA, 158 bp, Protomyxzoa rheumatica
caggggcattgtgaaatatctctgcactgatcccccaggtgatgggactcatttctaggctctgcctcctgggggaattgtcatatatttctgcactgatcacccaggtaacagactcttgtcttggatttgcctatgggggcattgtgacatatctc

SEQ ID NO: 4840 - DNA, 190 bp, Protomyxzoa rheumatica
gtgagcattaaactcacagatgtaaatgtgttttttgattgagtagtttggaaacattgtttttgtagaatgttcaacaggatattttagagcactttgaagcctatggtgataaaggaatttctttaggtaaaaactagaaagaagctttttgagaaactgctttgcaatgtgtgcattcaaatgaaag

SEQ ID NO: 4841 - DNA, 122 bp, Protomyxzoa rheumatica
tttgaaacactttttttgtagaatctgcaagtggatattttgattgctttgaggcttattgtggaaaaggctatgtccttaagtaaaaactacacagaaacattcccagaaacttctttgtt

SEQ ID NO: 4842 - DNA, 131 bp, Protomyxzoa rheumatica
ggaatggaatggaattcaatggactcaaaaggagtggaatagaatggaaagtactcgaatggaatggaatggaatgaactccaatggaatggaatggacaccaatacaacggaatgcaatggaaagcactc

SEQ ID NO: 4843 - DNA, 243 bp, Protomyxzoa rheumatica
tctgaggttagtgcacacatcacaaaggagtttctcagattgtttctgtctagatattatgtgaagatcttatctgttctgacataggctgcaaagcgctctaaatgtccacttgcagaatctgctaaaagaatgtttcaaaaatgctgaatcaaaagaaaggttcaactcggtgagatgtacctacaattaacagggaagtttctcagaattcttttatatagtatttatgtgaagatattt

SEQ ID NO: 4844 - DNA, 187 bp, Protomyxzoa rheumatica
gcctatattggaaaaggaaatatcttcacatatatacaagacggaagcattcagggaaactactttgtgatgtgcattcaattcaaagagctgaacatttcctctgattgagctgcttggaaagcatctttctgtagtatctgcaaatggacattttgagcgctttgaggcctatggtggaaaagga

SEQ ID NO: 4845 - DNA, 128 bp, Protomyxzoa rheumatica
tctgacataactatgtgctgatcacctcggtgatcagcacatagttatgtcagaaatccccagtaggctgaacgcagaaaagggttacatcactcaggtgatctgtgtagagatatgtgaaaattccc

SEQ ID NO: 4846 - DNA, 152 bp, Protomyxzoa rheumatica
cttcacataaaaacaagacagaagaattctgagaaaccactttgtgatgtgtgcattcaactcagagttaaatctatcttttgattcagcagtttggaatcaatatttttgtagaatttgcgaatgcacctttgggagatcattcaggccaa

SEQ ID NO: 4847 - DNA, 313 bp, Protomyxzoa rheumatica
gacaaacattcagacaatcgtagcagtgttctggaatcctcggtgagggacaaacattcggaacccagcagcagtgttctggaatccaatgttatggacaaacattcagagactcctcgcggtgatctggaattctatgtgatggagaaacactgagaaaccagcagtattgttctggaatctgatgtgacggacatacatttagaccagagcagtagagttgtggaatcctatattggggcaaacattcagtccccagcagcattgtcctgcaatcctttgtgagggacaaacattcagaacccagcagcag

SEQ ID NO: 4848 - DNA, 205 bp, Protomyxzoa rheumatica
ggagtggagtggagtggaatggaatggaatggcgtggagtggagtggagtggattggagttaaatagaatggaattgaatgcaatggaatggtgaaatgaaatgtgatctgagattgtgccactacactccagcctcagtgacagagtgacactctttcgaagaaaacgaatggaatggaatggagtggaatggaatggaatgga

SEQ ID NO: 4849 - DNA, 231 bp, Protomyxzoa rheumatica
aatgtgctcccaaatatttatttgcaggtgctacaaaaacagtttttccaaactgcttaatgaaaagaaagttttacctcagcaagatgaatgcacacatcacaagggtttctcagatagcttccttctcattttcttcctgggatattcgtttcttcgcagttggcctcagtgagctcccacatgtccatttgcagaatggaaattaaacagtgtttcaaaactgctgag

SEQ ID NO: 4850 - DNA, 193 bp, Protomyxzoa rheumatica
agcagtttttaaacactctttttgtagaatctgcaagtgaataattggagccctttgagggctatggtagaaaaggaaatatcttcaaataagaactacaaagaaacattctcagaaacttatttgtgatgtgtgcattcaactcacagggctgaacatatcttttgatttagcagttttgaatttctctttt

SEQ ID NO: 4851 - DNA, 122 bp, Protomyxzoa rheumatica
gaaagtgctgggattacaggcttgagccatggtgcccggccaaacctttcttttaattcagcatgttggaaacacagtttttgtagaaactgtgaaggtacattttggaatgcattgaggcc

SEQ ID NO: 4852 - DNA, 289 bp, Protomyxzoa rheumatica
agaatgcctctgtgtagtttttatgtgaaaatattttctttttcagagtaggcctcaattgctccaaatatccacttgcagacgctacaaaaagagggtttccaaactgctcaatcaaaagaaatattcaactctgtgagaggaatgcacatatcacagggaagtttcccagaaatcttctgtgtagtttttatgtgaagatatttccttttccacagtaggcctcataatgctccaagtatccacttacagattctacaaagagagtgtttcaaaactgctcaatcat

SEQ ID NO: 4853 - DNA, 217 bp, Protomyxzoa rheumatica
tggtaatgaccaggtctggaggtagaaaaaatgataaggtgttcaaagagtacaaacttccaattataagataagtaagttttggggatctaatgtatagccttaaaatgcagttaataactgtgttttgtatgcttaaaatttgctacaacagtaggagacctcaagtgctctcactgcaaaaaacataaccatgtgagatgacatgaatgttcaa

SEQ ID NO: 4854 - DNA, 213 bp, Protomyxzoa rheumatica
tttctacgtttaaaacatgtactttgccattgagaaacttagaacattgctgagcatgtattaaattcccatttctttcctgatttttaaatagttatcattttataattttctattgtttagtttgaagcttactaggattgtgtcattgatatgtatgtgtatatatatatacacacacaagtatatacataacatatgtaattaatatat

SEQ ID NO: 4855 - DNA, 140 bp, Protomyxzoa rheumatica
cattaaccagttttgccagtaatgggaaaaaaccccatgcacttctttcatacgtgacattctgtttgtatctgtcacccaggactctgttttaagactggtatgggcaccacagtggacaggaattgacagaaagattc

SEQ ID NO: 4856 - DNA, 185 bp, Protomyxzoa rheumatica
ggcagagagtggaaaagagttagataacctagttgatctttgcagaactatgtcaaaacgcccctataggcagagcctagataaatattacatcacctgggtggtcagtgcagagatacgtcacaataccctttgtaggtggagcctagacacgagttacatcacttgggtgatcagtgcagaga

SEQ ID NO: 4857 - DNA, 1101 bp, Protomyxzoa rheumatica
tcttccggttcaggaacatggaatttgttgccagttatttaagtcctttttagtttttttcataaacattctgatcctgtattttttattgtacaaaatatgtaccttcttattaaatttattgctaagaattgtattattttaatgttgttgcaaacaattgttttattaatttactgtcaaattgttcattgttggtatatggaaatgcactttatgtttctgtgttgtaaaaataattatttcatctctcaaatctagattagcaattcattcagaataaatatgccgtataaattggtagtcatttaactttttccaataagctaacaagttacaatatgtctaaatatgtaaaaaggttgaattgtgttagattttcacttactgtcacctgtcatttatcagtcagaattacattactgcacacatagaactttcatttctggggccgggcatggtggctcatgcctatattcctagcactttgtgaggccaaggcaggtggaccacctgagatcatgagttcgagaccaccctgaccaacatggtaaaaccccgtctctactaaaaatagaaaaataagctgagtgtggtagtgggagcctgtactccagctactttggaggctgacacaggagaatcacttgaacaatcccacaacacaaaacaacaaaagttagtcttcatgtcaaaaatcttcaatggattttttttcatcacaggattgtttagtgcaacattttatggaaaagatgcatgctactgagatgtagttctataaaagtctcttagagtttgtcatttttttgtgtcttacatcacatacctgtcctgttccaggctatttttcaaagatttttgtacacaaataacctggaaaaagggtagtagtttttctcttcaggtgaatggcagataaattactcaatcaatataataaagacaatttttctttgtgacgcaaaggttggacaggcttccatgtaacctactttaaaaagattgaggtttcttagtcttgagtctgctcagctatgacacaaatcttccccatgtacaatgtccatatgagccttttgaaatccttcaaaaaacgta

SEQ ID NO: 4858 - DNA, 774 bp, Protomyxzoa rheumatica
gaggaaaataatagctgttttagaaatataactttggaagttgcagtagactatgtgattccccaccatgttcacataccagaaccttaatccccagtgtaatggccttagcaggtcagaggtaattaagtcctaagcatgaggccctcgtgatagagattactggctttgtaaaagaaactgcagaaggctgtctctccctctctctgctaaatgagaaaacaacctgaagtctggagtttgaaactcagaagagagtccttaccagaccccaaccatgctggaagcctatctcaaatttctagcctccagaactaaattcttttgtttataagttgcgtagtctatgttttttggtatagaagtctgaactaagtcagaagtgataacctatcacatttgttgttttccctttgacagaaactagaaccaggtccccaaagagttcatccaatgactagcagaaattcttcagtttgcagaatgacagataagaaaagatagaacttgttgaaagcatgaaatttattccacttatgagacttctaaaaagtggctaaaattggtcggaaccaatatggtcaactggagtctgtgtgaaataagctcactgatgtaagagcccaaatttccatcacatgttttgtactaactgtccccaaatttgcacatgacctgtgtgtagcaagaaaagatggctgttcatgcccagtgactttccatacatttttcctttcagcaattccctgctaaacaagaagccacctcctaaac

SEQ ID NO: 4859 - DNA, 254 bp, Protomyxzoa rheumatica
gcctattgtggaaaaggaaatatcttcccataaaaactacatagaaacattctcagaaacttctttgtgttatgtgcatgtatgtagagagttgaacctttcatttgatttagcagtttgcaaacactcttttagtagaatctgcaagtagatatttgaagcccttggggcctattatggaaaaggaaatatcttcacataaaaactatgcaaaagcgttctgagaaacttcattgtgatgtgtgcattcactt

SEQ ID NO: 4860 - DNA, 197 bp, Protomyxzoa rheumatica
gaatggaatggagtggaatataatggaatggactgcaataaaatgtagtggagtgtagtggagtgtagtggagtgtggtggaatgtagtggaatggaatggagggcagtgggatggagtggaacagaacggaagacaatgaagtgcagtgtattgtaatggaatggagtggaatagaatggagtggagtggtgtgga

SEQ ID NO: 4861 - DNA, 125 bp, Protomyxzoa rheumatica
agttgaaccattcctttgattgagcagttttggaacactgtttttgtacaatccgccagtggatatttgatgcgctttgatgactatggtgtaataggaactatctttacataaaaactagacag

SEQ ID NO: 4862 - DNA, 206 bp, Protomyxzoa rheumatica
gttccagaacactcctgctgtgttccgaatgtttgtctctcactcaggattccagaacactcgtgctgtggtctgaaagtttgtccctcacttaggattccagagcactgctgttggtttctgagtgtttgtacttaacgtaagattccagaacacagctacttgggtctaaatgtttgtccctcacataggattccagaacactg

SEQ ID NO: 4863 - DNA, 381 bp, Protomyxzoa rheumatica
gacaaactttccgaccacagcaggagtgttttggagtcctatgtgagggactgatattcagacccccgaagctctgttctggaatccaaagtgagggagaaacactcagaacccagcagcagtgttctataatcctaggtgacagagaaacatttagaccctcctggcaatgttctggaatcctatgtgagagacacacattcagaacacagcaggagtgttcttgaatcctaaatgagggacaaacaagcagaactcagcagcagtgttctggaattctatgagagggaaaaaccctcagagcctagcagcagtgttctggaatggtacgtgagggactaacactcagaacccagcagcagtgttctggaatgctacgtg

SEQ ID NO: 4864 - DNA, 283 bp, Protomyxzoa rheumatica
gaattgagtggagtggagtggagtggaatggaatggaatgcagcagagtgtagtggagtgtagttcacagaagtggaatggaaaaggatggaatggaattgaatggaatgcaatgcaatggaacacaaaggaaaggatggtgaaattaaatgtgacctgagatagtgccactgcactccagccattgtgacacagtgagatcctgtcgaaagaaaggaatggaattgaatggagtaaaatggaatggaatggaattgaatggagtgtagtgaagtggtgtgga

SEQ ID NO: 4865 - DNA, 171 bp, Protomyxzoa rheumatica
ttctgtctagtttttatgtgaagatatttcttgttccaccgtaggcaagaaatcgctccaaatgaacacttacagattctataaaaagtgcatttcaacactgctctatcaaaagaaagattcaagtctgagagttgaatgcacacatcacaaagaactttctgagaatgc

SEQ ID NO: 4866 - DNA, 126 bp, Protomyxzoa rheumatica
ctatatctcactctgtctcccagactagagtgcagtggcataatcttagctcacatttcatttcatcattcaattccattccatttcattccgttcccctccattcccttccattccagtccactc

SEQ ID NO: 4867 - DNA, 318 bp, Protomyxzoa rheumatica
tatgtcactatgctccctgtgggcagggttcaggtaggacccttacattaccttggtgcttgttcagcaatatgtcccaatgccttctaaggacagagcaaagacaaaagagtaaaatcattttggtgttttacccatcgatatgtcacaatcttccccgtgggcagaacctgaaaaaagggaagagtcatattagctaaatgctgcgcctagcgataagtcacaattcaccctataagcagggactagacagaagatagagttacatcatctggtggctggtgcagggatacgccaccatgccctctctgggcagga

SEQ ID NO: 4868 - DNA, 179 bp, Protomyxzoa rheumatica
ttactttccattcgattccgttccattcgaatcaagttcattgcaatccattacatttgtgttcgttctgttcctgtcctttccattgcggtccattccttttgattccattccattctattgtattccacactattgccttccattcaattcccttctattcgaataaattcctttcg

SEQ ID NO: 4869 - DNA, 181 bp, Protomyxzoa rheumatica
ggagtgttatggaatcctatgtgagggagaataatacagacacaagtagcagtgtcctggaatcgtatgtgagggacaaacacccagaactgaacagccgtgttctggaatccgaagtgaagtacaaacatttagaccacagcaggagttttctcgaatcctatgtgagggagaataattc

SEQ ID NO: 4870 - DNA, 217 bp, Protomyxzoa rheumatica
gtgcccacagggggattgagagatatctctgcattgatcccgaggtgatccaaattttgcctggtctctgcctgctggggacattgtgacatatctatgcactgatctcccaggtaactttagtctaggctctggagacaaggcatcgtgacatatcactgcactgatcacccaggcgatataactcttgtctaggctctgcctacaatggtcttgt

SEQ ID NO: 4871 - DNA, 199 bp, Protomyxzoa rheumatica
taccattggggtatgaatgtttgttcctcacataggattccagaacactgttacgagggtctgaattattctccctcacatagctttccagaatacgcctgctgtggtctgaatgtttgtccctcaattaggattccagaacactgccgttgggttctgagtgtccgtgcctcacgtatgattccaaaacactgctacg

SEQ ID NO: 4872 - DNA, 256 bp, Protomyxzoa rheumatica
attccactcccttccattccatttcattccactccattcccgtccattgcactccacttcattccactccactgcactccattccactccattcctttccattccactccattgctttccattctaatccattaaattccatgccattatttctactggatctcactctgtcacccagactgttgtgtagtggcacaaccttagctcacattttttcaccattccattccactccattccattccattccattcca

SEQ ID NO: 4873 - DNA, 648 bp, Protomyxzoa rheumatica
actgctctatcaaaagaaagtttcaagtctgtgagttgaattgcacacatcccagtgaactttcggaaaatgcatgggtctacttttcatgtgaagatacccgtttccaacgaattcttcaaagagttccaagtatccacaagcagattctacaaaaggagtgcttaaatgctggtctatctaaagacagattcaactctgttagttaaatgcacacatctcagtgaagttcctgagaatgcttctttctagtttttatgtgaatatgtctccttttccaccataggcttcaaagcgctccaaatgagaactggcagatcctcataaaagacggcctctaaaccgctctatcaaaagaagggttccactccaagaggtgaattcacatatcacggagaagtttctgagaatgcttctgtccaatttttatgtgaggatattcccttttccatcataggactcaagtcgctctaaatatccaatttcagatactacaaaaagactgtttcaaaaccgctctctcaaagggaaggttcaagtccgtgagttgaatgcacacatcacaaagcagttcctgagaatgcttctgtctaatttgtatctcaagttatttccttttccatcataggcctcaaatcgctccaaata

SEQ ID NO: 4874 - DNA, 129 bp, Protomyxzoa rheumatica
tgctcttaaatatccatttgcagaatagagaaaaagattgtttccaaactgctgaatcaaaggaaagttttagctctgtggaatgaatgcacacatcacaaagcagtttgccagaaagcttcattgcag

SEQ ID NO: 4875 - DNA, 224 bp, Protomyxzoa rheumatica
aaagcttctgtcaagtttttatgtgaagatatttccttgctcaccatagtcctcaaactgctcagaaatatcactttgcagattctagaaaaaggctgcttcaatttccaaactgctcaatccaaagaaagcttcaactctttcagatgaatgcacacatcacaatgaagtttcacagaatgtttctgtttagtatttagaggaagatatttcctttttcacca

SEQ ID NO: 4876 - DNA, 159 bp, Protomyxzoa rheumatica
taggattccagaacactcctactgtggtctcaatgtttgtccttcacttaggattccagaacactgctgttgagttctgtctgtttgtccctcacgtatgactccagaacactgagacgtgggtctaaatttttatccctcacataggatttcagaaca

SEQ ID NO: 4877 - DNA, 129 bp, Protomyxzoa rheumatica
tagtcccacgtagaagtgttctggaatcatacgtgagggagaaacactcagaacgcaacagcagtgatctggaatcctaagtgggagataaacattcagatcacagcgagtgttctggaaccctatgtg

SEQ ID NO: 4878 - DNA, 228 bp, Protomyxzoa rheumatica
agcagtgttctggaatcctatgtgaggaataaacattcacagcacagcaggagttttctggtatcctatttaagggacaaacattcagaccctcgtagcagtgttgtgaaatcctatgtaaaggacaaacattcagaccacagcagtagtgatctggaatcctatgtgaaggacaaatattcagaaccctgctgcagtgttctaaaatcctatgtgacagacaaacat

SEQ ID NO: 4879 - DNA, 127 bp, Protomyxzoa rheumatica
tttatatgaagatatctccttctccaaaatagtactcaaagccctccaaatattcactttcagattctacggaaagaatgtctcaaaactgatcaatcaaaacaatcgttcaactctgtgtgatgaa

SEQ ID NO: 4880 - DNA, 166 bp, Protomyxzoa rheumatica
agtttttatgtgaagatatttccttttccatattaggctgcatagggctcccaatatccacttgcagattattgaaaaagagagtttcaaaaccgcttaatcaaaaaatacgttcaactctgtgaatagaatgaatacatcacaaagaagtttctcagaatgcttg

SEQ ID NO: 4881 - DNA, 289 bp, Protomyxzoa rheumatica
atggaatggaatggagtggaatggaatggattggagtggagtggaggggagtggagtggaaagaagtggaatggaatgggatggaatggaaaggactggaatagactggaatggagtggagtggaggggaacgtactggagtggagtggagtggaatagaaaggaagagaatggaatggaatggtgaaatgtaatatgagctgagattgtgccaccacgctccagtctgggtgacagagtgagatattctcgaaagaaggaaatggaatggaatgcagtggaatggaat

SEQ ID NO: 4882 - DNA, 265 bp, Protomyxzoa rheumatica
ttttcctattcttactttgggtttaatctgctccttttttcctttattttagatcattcttgttttctaatatatgcttttgatgccataaattttcttctaagccatgcttttgctgtaatctaaaaattttgataaattgtgttttattttcatttttatttagtgaaaatatttattaggccaggcatggtggctcactctagtaatctcggccagggaggctgagatttgaaaggccaaggcaggaggattacttgagacc

SEQ ID NO: 4883 - DNA, 141 bp, Protomyxzoa rheumatica
atcccattcgatgatgtttccatttgattccattctatgatgattccattcgactccattccaggattactccattcgattcaattcgatgatgattccatttggctccattcgatgattccttttgattccattcgatga

SEQ ID NO: 4884 - DNA, 186 bp, Protomyxzoa rheumatica
tgtaaacaggatatctacacatacaaactagacagaagccttctcaaaaactgctttgtgatgtctgcattcccctcacagattggaacccttcttttatgaaagcagttttgcaacagtgtttttgtagtacctacaagtgtttatttagaggtctttgaagcctatggtggaaaaggaaatatc

SEQ ID NO: 4885 - DNA, 220 bp, Protomyxzoa rheumatica
tgaacggaattgaatggaatggattctaaaggactgaaatggaatggaatcggatgatctggaattgaatagaatcgacttgaatgtaatggactcgaatggaatggactcgaatggaatggatttgaatgcaatagaatcggatggaatggaatcaaatggaatggaatcgaatcaaatgaacacgaagggaaagaactggaatggaaaggtctaatgt

SEQ ID NO: 4886 - DNA, 164 bp, Protomyxzoa rheumatica
ttccattccattccattacattacatttcattgcattccactccaatccttttgattccactccattccagtccattcccctccactccgctccactccaatcaactcaattccacttcactcccctaaactccactgcacttcattccattccattccattcc

SEQ ID NO: 4887 - DNA, 132 bp, Protomyxzoa rheumatica
ctgcacttcagtctgggtgacagagtgagatccaattgaaataaagaaatggaatggaatgaagtagaatggaatggaatggagtaaagtggaattgaatggattggaatggagtggagtggaggggaattt

SEQ ID NO: 4888 - DNA, 201 bp, Protomyxzoa rheumatica
ttggaaacacgctttttgcagaatacgcaagtggatatttggatagctgtaacgatttcgttggatacgggaataacttcatataaattctagacagaggcactctcagaaactgctttttgatatctgcattcaagtcacggagttgaacattctctttcttagagcaggtttgaaacactctttttgtagtatctggaa

SEQ ID NO: 4889 - DNA, 141 bp, Protomyxzoa rheumatica
actgtttttgtagaatatgcaaagggatatttaggagagcattgagccctatggtgaaacaggaatcacgttcagatataaactggaaagaagctgtgagaaactgctttgtggtgttggcattcatctcacagagttaaa

SEQ ID NO: 4890 - DNA, 135 bp, Protomyxzoa rheumatica
gtggaaaaggaagtatcttcatataaaaactagacagaagaattctgagaaacatctttgtgatgagtgcgttcatctcacagagtcaaaaatttcttttgattgagctgtttggaaacactctttttgtagaat

SEQ ID NO: 4891 - DNA, 167 bp, Protomyxzoa rheumatica
caagtggacatttggagcgctttgaggcccatggtgggaaaggaaatatcttcacataaaaaccagacagatgcattctgacaattttctttgtgatatgtgcattgatctcacagagttgaatcttacttttcattgagcagttttgaaccactctttttgtagaa

SEQ ID NO: 4892 - DNA, 158 bp, Protomyxzoa rheumatica
taaaacttgacagaagaattatcagaaacttcgttttgatgtgtgcattcaactcaaagagttaaaccatcctttcgatagagcagttttgaaatactctttttttagaatttccaagtggatatctagagccgtttgaggcgtacagtagaaaagga

SEQ ID NO: 4893 - DNA, 340 bp, Protomyxzoa rheumatica
ggttctcagtgtttgtccctcacgtacgattacagaacactgctacatgagtctaaaagtttttccctcaataggatttcggaacactgctgctggcgtctgaatgtttgtacctcacatgggattccagaacaatcgtgctgtggtctgaacgttactcacataggattccagaacattccttctgtggtctgaatgtttctccctcacgtcggattccagaacactgctacgagagtctgaatacttttccctcacataggatttcagaacactgctaagagggtctgaatgtttgtccttcacataagatccaagaacactgcctctgggttttgat

SEQ ID NO: 4894 - DNA, 260 bp, Protomyxzoa rheumatica
ttgcgtcttatgtgagggacagccagaacccagcaggggtgttctggaatcctatgtgagggacaaatatacagaccacagcagaagttttctggaatcctttgtgcagaacaaacattcagaccacagcaaaatttttccagaatcctatgtgagggacaaagcttcagaacctcttagcagtgttcttgaatcctatgtgagggacaaactttcagactcctgtggcagtgttttagaattcgatgtgaaggacaaac

SEQ ID NO: 4895 - DNA, 81 bp, Protomyxzoa rheumatica
tcctgtggcagtgttttagaattcgatgtgaaggacaaacgatcaaaacccagaggcagtgttcttggatcttatgtgaag

SEQ ID NO: 4896 - DNA, 136 bp, Protomyxzoa rheumatica
cattgaggcctatggggaaaaacaaaatatccttagaaaaaaaactataaagaatctatctgtgaaactgctatgtggtgtacagattcatctcactgagttataactttcctttgattcagcaggttacaaacac

SEQ ID NO: 4897 - DNA, 253 bp, Protomyxzoa rheumatica
tcttgtctacgctctgccaataggagttttatgacttatacctgcactgataacctaggtgaagtaacacttgtctaggccctgtttacacggaaattctcacatatctctgcactgatcacccaggtgaagtaactcctgtctaggttcagcctataggaccgttttgacatacctctgtgctgatcactgaggtgatgttacccttgtcgaagctctgcctacaggggcattgtgacagatctctccactg

SEQ ID NO: 4898 - DNA, 147 bp, Protomyxzoa rheumatica
tacgtcataaatcccactgtaggcaagcctaggcaagcctagacaattttacatcacctcagcgatcagttcagagatatgtcctgatgtacctctaggcagagctcagacaagtgtcacgtgtcttgggtgatcagtgcagagata

SEQ ID NO: 4899 - DNA, 296 bp, Protomyxzoa rheumatica
tgattccattcgtcttcatttattattcaattccattccttttgttaattgcattcgagtccattcaatgattctatttgattccatttgataattccattcgattccattcgatgatgattgcatttgattccattctatgattccctttgattccattcaaagttgataccattcgagtccatttgataattccatttgactccattctccaatgattccactcgagtccattcaattgttccattcaattccagtcgatgatgaatccattcaattccattcgatgattccat

SEQ ID NO: 4900 - DNA, 135 bp, Protomyxzoa rheumatica
ctcagaattcttctgtctagcttttatgtgaacatatttcctttcacaccttaggcctcaaagcgctcccaatgtcaatttgcagattccacaaaaagaaaatgtcaaaagtactccatcaaaagaaaggtttca

SEQ ID NO: 4901 - DNA, 143 bp, Protomyxzoa rheumatica
atggaatggaatcaaacggaatgaaatcgaattgcagcgactggaatcaaatggaatgcagtgaaggggagagcattggattgcaatggagaggaatggaatggggtgaaaaggaactcaatggactggagtggagtgaagtt

SEQ ID NO: 4902 - DNA, 135 bp, Protomyxzoa rheumatica
atctcacagagttaaaactttcttttgattgagcagttttgaaactctctctttgtgacagtccacctgcagactccacaaaaagattgtttccaaacttctcattcaaaagaatgctcaattctgtgagatgaa

SEQ ID NO: 4903 - DNA, 174 bp, Protomyxzoa rheumatica
tcaaaacaaacaaataaataaataaagcaattattataatacgatggtcaaaatgttcttattcagtcagcctctcaccagagctgagtggaggggtcttcaactctagacggcaagttaaggaagagttttgaagaggtaatggcagagctgaatttttttctgtttttgttt

SEQ ID NO: 4904 - DNA, 128 bp, Protomyxzoa rheumatica
atagagcagtttggaaagactctgtctgtaaagtctgcaagtgaatacttggacccctttgtgtacttcgttggaagagggattttttcatttactgctagacagaagaattctcagtaaatcctttg

SEQ ID NO: 4905 - DNA, 146 bp, Protomyxzoa rheumatica
gacctctagctctctttgccagcctcctggctagacctgctctcattgtgcaccccttgtgacgtgcaaggaggtcgctcgcctctctgtgcccttgtccatctgtgaaattttggctgaggttctcccaacaccttccgactgca

SEQ ID NO: 4906 - DNA, 226 bp, Protomyxzoa rheumatica
ttcagtgctctggccccttatccaagctagtcaaagtgtggtctatggtttttcattgcaagggatccccgggtgaatcttatgtctgtcaaaggaggaaaagcactgccctcaaaatatagaaaaggtgaactaatttatacaagcagcctggctgtttatttatgtatgtatttatcttgttgatgggaagattcaaattgatatacacagtcacccccataag

SEQ ID NO: 4907 - DNA, 273 bp, Protomyxzoa rheumatica
ccagaacactgctgctggggtctaaaagtttgtctgtcacataggatgccagaaaactgctgttagtttctgagtgtttctccctcacatagaattccataacaatgcaatgaggatctgaatgtttgtccataacataggatttcagaacactccagttattgtttcaatgtttgtccctcgcataggattccagaacactgctaagagggtctgaatgtttgtccctcacataggattccaaaacactcctgctgtgttctgagtgtttgt

SEQ ID NO: 4908 - DNA, 213 bp, Protomyxzoa rheumatica
tagcagtgttctggaatcctatgtgggagacaaacattcagagaatcgtagcagttttctggaatgcaatgtgagggaaaaacattcagacccctgttgcagtgttctggaaacctatgtgagggacacacattcagaccactgcatgattgatctggaatcctatgtgaaggacaaacactcagaacacagcaggagtgttttggaatccta

SEQ ID NO: 4909 - DNA, 206 bp, Protomyxzoa rheumatica
tggaatggaacggacttgaatggatcgaaatcaaaaggaatggagtctaatggaatgcaatcgaatggaatggacttgaattcaatggatccgaaagtaactgtctcgaatggaacggaatggaaaggaatggaatggaatggaaagacgcgaatggaataaaattgaatggaatggactcgaatgtaatggactggaatggaatg

SEQ ID NO: 4910 - DNA, 142 bp, Protomyxzoa rheumatica
tttaggacttttatagtttgaggtcatctatttaaatctttaacctattttgagttaacttttattcatggttaaatgtaacggtccacttttattcttctgtgtacggctatccagctatcctagtaccattcattgaata

SEQ ID NO: 4911 - DNA, 237 bp, Protomyxzoa rheumatica
aatgtatagattccaagccatttctatcaaactaccaatgccatttttcacagaattagaaaaactattctaaaattcttatgaaatgaaaaagagtctgagtagcccagggaatcctaagcaaaaacaaaacaaaacaaaataaaacaacagcaataaaaaaaagaaaacaaagctgaagccatcaggttaccttactctgaattatgctataaggctataataaccaaaacagca

SEQ ID NO: 4912 - DNA, 130 bp, Protomyxzoa rheumatica
tcatttaatggaaacgaatggaatcatcaacgaatggaatcaaatggagaaatcgaatggaatctgatggaatcatcatcacatggaacagaatgcagtcatcattgaatggaatcgaatggaatcatca

SEQ ID NO: 4913 - DNA, 143 bp, Protomyxzoa rheumatica
aggatggaaaccctcacataatagaagtgaagagagggaacaaagccaggaatcgttaagagactgatgcctggaaggcctgggtagaatgacaggcagattggagcagaacagaggccctagatggggacaaggggaaggga

SEQ ID NO: 4914 - DNA, 174 bp, Protomyxzoa rheumatica
aaagaacaaagggaaatgtgaaggtctcttatcgtatcacccaggctcagaatgggcagactaccactttaccacatccattggccaaagtgagtcacgtggccaaaccagaagtcaagggcaggaagtttaagtatgaatcccatctccacgtgctatgatttcctgggcttt

SEQ ID NO: 4915 - DNA, 140 bp, Protomyxzoa rheumatica
atcctatgaaggtttcaaatgtgattctacagaaattcatactcaataattttatcagaacactaagcatcatctgccccatataataaaacctaatgttattttacttcaaaattttaaggtttttggtatgtattgag

SEQ ID NO: 4916 - DNA, 162 bp, Protomyxzoa rheumatica
tgtctctactatttacagttcacattgtaccttgcaatgaatatacattttatccaaaaaggctaaaaaataatgaaattggggtgggaatggctggaagtataggtgaaacaaaaatgacacatgactagtagctgttaaagctgggtgactggtctgtta

SEQ ID NO: 4917 - DNA, 561 bp, Protomyxzoa rheumatica
cgatgattattccattcgggtctattcgatgatcacattcgagtccatttaatgattccattgggttaaattcgatcacgattacattggattccattctatgcttccatcgattccactcattgatgattccattcgattccattcaatgattattccacttgagtcgattcgatgactccattcgattgtattcgatggtgattgaattcgagtccatggattaatccattgcattccattcgatgattccattcgagtccattcgatgattctattcgattgcattcgataattccattcgattgcattcgataattccattcgattccatttgataatgattccaatcgagaccatttgatgattccattcaattgcattcaatgatgatccctttcgagtccattcaatgattccattcctgtccattcgatgattccctctgattccattcaatgaatccattcgattccattctatgacgattccattcatttccatctgatgatgatttcaatcaattttattcgatgattccattcgaatccattcgatgat

SEQ ID NO: 4918 - DNA, 212 bp, Protomyxzoa rheumatica
tggcaaattatgatacacatttcaaagtagatattaattacactgagaataaatcccttggctccaaaatcatgttaggtgccctttctatacagtgtaatagcaatacccacttcttcctttgcatatatattcccagcctgcaactgtattgttacatatgtatctttggaagtgcactataaaagctttatttaccaatttattgctta

SEQ ID NO: 4919 - DNA, 194 bp, Protomyxzoa rheumatica
gaatcctatgtgggggacaaacattcaaacaacagcaagagtgttctggaatcctctgttacagagaaacattcagatcctcgtcgcagtgttctggaattctaactgagggagaaacactctgaacccagcagcagtgttctggaaccctatgtgacagacatacatgtagaccccagcagcagtgttctgga

SEQ ID NO: 4920 - DNA, 331 bp, Protomyxzoa rheumatica
tccttttgattccattccatgattattccatttgagtcaattcgatgaagattccattcgattttatttgatgattccattcgattccatttgatgatgcttctgttcaagtccattcaatgattccatttgattccattcaaagatgattccattcgggtccattaggtgattccatttgattccattcaatgatgattctattcgagtccattcaatgtttccatttgagtccattcaatgattccatttgagtccatttgatgaacctattcgataccattcaatgatgtttccgttcaagtaaattcgatgattccattcgagtcca

SEQ ID NO: 4921 - DNA, 143 bp, Protomyxzoa rheumatica
ctcagaaacttctttgtgatgtgtgctttcaaatcacagagttaaacctcttttgatacatcagttttgaaacactttctttgtagaatctgtgatgggatatgtgggagtacattgaggccaatggtggaaaaggaaacatc

SEQ ID NO: 4922 - DNA, 124 bp, Protomyxzoa rheumatica
agcctgggtgacctagtgagatcctgtaaaaagaaaggaatggaattgaatggatttaaagtggaatgtaatgcaatggactggagtggagtggattagcatggagtggagtggagtcgagtgg

SEQ ID NO: 4923 - DNA, 194 bp, Protomyxzoa rheumatica
ggacaaacattcagaccacagcaggagtgttctggaatcctttgtgaaggagaaatattcagacccttgtagcagttctctggaatcctatttgagggacaaatattcagaacacagtagaagtattctgaaatcctatgtgagggacaaacattcaaacgacagcaggagtgctctggagtcctatgtgagtg

SEQ ID NO: 4924 - DNA, 198 bp, Protomyxzoa rheumatica
gaacaatcttgccgtggtctgaatgtttgtccctcatgtagggttctgttacactcctgctgtggtctaaatgtttatccctcacataggactccagaactctcctgctatggtctgaatgttggcccctcacatagcagtccagaacactgctgctgtggactgaatgtttgtccctcacataggattccagagcac

SEQ ID NO: 4925 - DNA, 285 bp, Protomyxzoa rheumatica
tttcgagcgctttcaggcctatggtgaacaaggaaatatcgtcccataaaaactagacagaagcattagcagaaaattgtttgtgatgtgtgccctcaactcacagagtggaacacttcgtttcacagagcagtttggaaacacgctttttgtagaatttgcatgtggatatttggatagctttgtggatttcgttggaaacggaagtatcctcatataaaaattagacagaaacattctcagaaaccgctttgtgatgtctgcattcacgtcacagagttgaac

SEQ ID NO: 4926 - DNA, 201 bp, Protomyxzoa rheumatica
ttctacaaaaagagtgtttccaaactgctgtatcaaaagataggttgtactctgttagttgaggacacacatcataaataagtttctgagaatgcctctggctagattttacctgaagatattacggtttaaaatgaaatccttgaagctctccaaatatccgcttacagattctccaaaaagagtctttcaaaactgctc

SEQ ID NO: 4927 - DNA, 163 bp, Protomyxzoa rheumatica
aggatgaaatctccttgggtgttgcggtacgtgtctgtagtccaagctacttgggtggctaaggtgggaggattatttgagcccaggaggttgaagctacagtgagctgtgatatgccactgcacttcagtctgagcaagaaagcataactttgtctcaacaa

SEQ ID NO: 4928 - DNA, 262 bp, Protomyxzoa rheumatica
ggacacacatcataaataagtttctgagaatgattctgtctagtttttatggtaagatattttctttttcaacacaagcctgaatacgctccaaatggatacttccagatatgacagatgaagtgttttataccttctctatgagagggaatgttcaattctgtgacttaaattcaaacatcacaaagtagtttctcagaacactgctgtctgattttatatgtattcccgtatccaacgaaatcctcagagccagccaaat

SEQ ID NO: 4929 - DNA, 154 bp, Protomyxzoa rheumatica
tgctgccaggattccagagttccatggcaagagtgggtcactccttgcctgttcaactcactccttcctcaggagtctctgggaacgaggaatgagtcctggtgcacagtatccctatgcagggtgcccagcttcctccctcttcagcctagtg

SEQ ID NO: 4930 - DNA, 166 bp, Protomyxzoa rheumatica
tttgattccattcgatgatgattccattagattccactcgatgatgattccttttgatttcatttgacgactccactctattccatttaatgatgattccattcaattccattcgacgattccatttgatgacgtttctatgagagtccatttggtgattccattc

SEQ ID NO: 4931 - DNA, 131 bp, Protomyxzoa rheumatica
taggtttgaaacactctttttgtagtatctgggagtggacattttgtgcgctttgagtcctatggagagaaagggaatatcttcccatgaaaactagacacaagcattctcagaaactggtttgtgatgtg

SEQ ID NO: 4932 - DNA, 268 bp, Protomyxzoa rheumatica
gattccagaacactgctgctggggtctacatgtatgacagtcatgtaggattccagaacacttctacgattgtcagactggttgtccctcacatgggattccggaacactgctatgagtttctgaatgtttgtctctcacataggattccagaacactgctaccgtggcctgaatgttttcccctcacataggattccagaacacacattcgagggtctcaatgtttgttcctcacacagaatcccagaacactgctatgagagtctg

SEQ ID NO: 4933 - DNA, 294 bp, Protomyxzoa rheumatica
tctggaatcctatgtaagttacaaacattgaaacaacagcgggagtgttctggaatcctttattgcaaacaaactttcagaccctcgtcgcagtgctctggagttctatgtgagggagaaagactcagaacccagcagcagtgctccggaatcctatgtgacagacaaacatgtataccccagcagcagtggtatggaatcctatgtgagggacaaacattcagaccaagacagcattgttatggaaaactatgtgagggaaaatcattcagactcttgtagcagtgttctggg

SEQ ID NO: 4934 - DNA, 415 bp, Protomyxzoa rheumatica
ttttattccattccattccattcctttccattggagtccatttggctggagtccattctacctgaatccactgcattggagtttattccactcgtgtccattccattctagtccatttgactggagtctattccactcgagtcccttccactcgagtccattccatttctatccattccattccttcccatttcattcaattccgttccattcgagtccattccattcctgtccaatccattcaagtccattccattccattgctttccatttgattccatttgattcgagtccattcccttcgagtccattccgttccagtacattccattcaagttcattccactccaccgcatttcaatccattcctttccttttcagtccatttgattcaattccactctactccactcca

SEQ ID NO: 4935 - DNA, 285 bp, Protomyxzoa rheumatica
ctgcactgatcacccaggtgatgtaactcttgtctaggatctgcctacaggggcactttaacatatcactgcactgatcaccgagatgatgtatctcttgtatatgcttcgccgacaggggggattgagacatatctatgcactgatcacctaggtgatgcaactcttgtctgggatctgcttacagggggcaatgtgacatatctctgccctgatcaaccaggtgatgtaactttggtctaggctctgcctactggagacattgagacatacctatgcactgat

SEQ ID NO: 4936 - DNA, 332 bp, Protomyxzoa rheumatica
ggtagaattcggctgtgaatccgtctggtcctggacttctttttgttggtaggctactaattactgcctcaattttagaacttgttattggcctattcaaggattcgacttcctactggtttgcacttgggagggtatatgtgtccaggaatttatccatttcgtctagattttctagttaatttgcaaagagttttttataatattctctaatggtaatttttatttctgtggatcaatggttatatcccctttatcatttcctattgcatgtatttgattcttctcttcttccttattactctggctagcagtttatttatttcttgatc

SEQ ID NO: 4937 - DNA, 136 bp, Protomyxzoa rheumatica
attcaattccattccaccccagtccattccaccgcattccatgacactcctctccagttcaccactgtcctttcgattccattcgatatcatttgattccattccattcgatacctttccattccactcaattaca

SEQ ID NO: 4938 - DNA, 166 bp, Protomyxzoa rheumatica
tgtgctctgaatgattttctctcacataggattccagaaccctgctgctgggttctgatggcttctccctcacataggattccagaaaactgctgcgaatgtctgaatgattgtaaatcacaaaggattccgtaacactaatgctctcttctgaatattggtacct

SEQ ID NO: 4939 - DNA, 148 bp, Protomyxzoa rheumatica
actctgtttgttgagtacacacatcaaaaacaagtttctgacaaagtttctgtctagttttcatgggatgatatttcctttttcaccgtaagcctccaagctctccaaatgtccacttccacatactacaaaaagaatgtttcaaacc

SEQ ID NO: 4940 - DNA, 229 bp, Protomyxzoa rheumatica
aagaagtcaagctgggagtattgtgggatgtggtctcagtggtggtgatggaagaagtgaagctgggagtactgtgtgaggtggtggtggttgtggtgatcaaagaagtgtagctgggagtactgtgtgaggtggtttcggtggcgatgatcgaagaagtgaagctgggagtactatgagaggtggtctcagtggtcctgattgaagaagtgaagctgggagtactgtg

SEQ ID NO: 4941 - DNA, 162 bp, Protomyxzoa rheumatica
agaagcaatctgagaaacttctatgtaatctgtgcattcttctcacagagttaagcctttcttttgattgaggagttttgtaactctctttttgtagaatgtgcaagtggacatttgtgccactttgaggcctatggtggaaaaggaaatatctccacataa

SEQ ID NO: 4942 - DNA, 150 bp, Protomyxzoa rheumatica
tgcagcctctctgtggagtggttgtttgagctgtgcctggaaggaatctctaggtatacccttgcgctaaaagcaaacccattaggtcattaagattttcttaccccaaagcttagtttccattccttagagacacattgcaggccaggc

SEQ ID NO: 4943 - DNA, 170 bp, Protomyxzoa rheumatica
tttgagatgtgtgcattcaactcccagagttgaatatactttttcatagagcagtactgaaacactatttttgtagaatctgcttgtggatatatggagcaatttgaggatttccttggaaatgagatatcttataatcaaaactcaagagaagcattctcagaaactgc

SEQ ID NO: 4944 - DNA, 135 bp, Protomyxzoa rheumatica
ccctgaaaacaggtgacaaaaatgacaatttaaaaaatttaactttcacttcatgtttaaataagactgccatgacatgactcaaaggagactctcagggaatactttccattcatttcaaaagttgattaatat

SEQ ID NO: 4945 - DNA, 135 bp, Protomyxzoa rheumatica
ccattctttggatttagcaatttggaaactgtttttatgcagagtttgcaaagggatatttcagagacccttgagacctatggtaaaaaggaaacatcctaagataaaaactagaagtaagctttctgagaaact

SEQ ID NO: 4946 - DNA, 234 bp, Protomyxzoa rheumatica
caccgaagtttccagaataagcctgctgttgtcttaatgtttgttcctcaaataggattacagaacactactgctgtggtctgaaaagttgaccgtcatataggattccagaacactagtgctgtggtctggctgtttgtgcctcacgttggattctagaacaatccttctgtgttctgaatgtttcttcctcacataggcttccaaaatattcctgctgtggtctgagtgttt

SEQ ID NO: 4947 - DNA, 302 bp, Protomyxzoa rheumatica
atttaaaaagaaactatctgtgaaactcctttgtgagatgtggacatttgagtgccctttcaggcctattgggaaaaactgaataaccccagataaaaaccagaaagaagccgtctgtgaaactgctttgcaatgtgtggattcatctcacagagttaaaactttcttttgattcaccatgttggcaacactctttttgtagaatctgcaaagggacatttgggaacacattgagtccaatagggaaaaattgaataccccataaaaaagtagaaaaaagctatatgtgaatctgcttggtg

SEQ ID NO: 4948 - DNA, 153 bp, Protomyxzoa rheumatica
aatatcttcacataaaaactagacagaaggaaactgagaaacatctttgtgatgtgtgcattcatcttaaagagttgaatttttctttttattgagcagttttgaaacactccttctgtagaatctgcaagtggacatttggagcgctgtgta

SEQ ID NO: 4949 - DNA, 172 bp, Protomyxzoa rheumatica
atcttcacataaaaagtacacagaagcattctgagaaactctttgtaatgtgagcattcatctcacagatttgcacctctgttttgattgagcagtttcaatctgcaagtgtatatttggagcgttttgtggctatggtagaaaaggaaatatcttctcataaaaagtacac

SEQ ID NO: 4950 - DNA, 230 bp, Protomyxzoa rheumatica
ttcagatcctcgtcgcagtcttctggaattctttgtgagggaggaacactcagaatcctgcagcattgttctggaataccatgtgacggacatacctgtagacccctgaagccgtgtcatggaatcctatgtgagggacaaacattcagaacccagcagcagtgttctggagtcccatgtgagggacaatcattcagaccatcgtagcagtgttctggaattctgtgtga

SEQ ID NO: 4951 - DNA, 192 bp, Protomyxzoa rheumatica
tcgcaccactgcactccagcctggtcgacagagcgagactccatctaaaaacaaaacaaaacaaaacacatacacacacatatacacacacctacacatacacatacataaacacacccatatacatatacacacatacacacacataaacacacaaacacacctccacacataaacacacacctacacatg

SEQ ID NO: 4952 - DNA, 211 bp, Protomyxzoa rheumatica
gtggagcagttttgaaactccctttttgtaggatctgcaagtggatatctggatccctttacaaccttctgtggaaaaataaatatcttcacataaaagctactcagaagcattctgagaaacttcttattgatgtgtgctttcatctcagagagttgaatatttcttttgatgagcagtttggaatcacagtttttgtagaatctgcaag

SEQ ID NO: 4953 - DNA, 159 bp, Protomyxzoa rheumatica
aatggactcgaatggaatcatcatctaatggaatcgaatgcaatcatttaatggactcgaatggaatcattgattggactcgaatgtaatcattgaatggaatcgtatttaatcatcatccaatgaaatcaagtagaatcagcgaatggactcgaatgg

SEQ ID NO: 4954 - DNA, 175 bp, Protomyxzoa rheumatica
aaatattcagaccacagcaggattgttctggaatcccatgtgaggcgcaaacacctagaccacagcaggggtgttctggaatgctacgtgagggtcaaccattcagaaaacaacagtagtgtttgggaatcctatatgaggtacacacattcagaacagagtgggagtgttctgc

SEQ ID NO: 4955 - DNA, 145 bp, Protomyxzoa rheumatica
tgcaaatatccctttgtagtttgtacaaaaacagtgcttccaaactgctgaatgaaaagaaaggtttaactctacaagatgtatgcacccatcacataactgtttctcagataacttccttctagtttttatcctgggatatttg

SEQ ID NO: 4956 - DNA, 165 bp, Protomyxzoa rheumatica
tttccctcacataggattccagaacactcctggtatgttctgaatgtttggccctctcttaggattccagaacactgctatatggttcttagtttttgtccctcatgtacgattccacaacactgttacctgggtgtaaatgtttgtcccttacatagtattcca

SEQ ID NO: 4957 - DNA, 124 bp, Protomyxzoa rheumatica
aaacaggtgatgtaacccttctcaaggttctgcttacatgggctttgtgacatatctccgcacagatcaccccagggtggaaatacttgtctacactctgcctacaggaggctttatgacttat

SEQ ID NO: 4958 - DNA, 298 bp, Protomyxzoa rheumatica
aatctgcaagtggatatttggagccctttgtgctcttcggtggaaaaggatatatcttcaaataaatactacacagaagcattcagagaaacttcattgtgatgagtgcattcatcacacagagttgaaaccttcctttgattgaacagttttgaaacactctttttgcagtatctgcaagttgatatttggagagctttggggcccattgtggaaaaggaaatatcttcagataaaaacgacacagaagctttctgggaaacttctttgtgatgtgtgcattcaactcacagagttg

SEQ ID NO: 4959 - DNA, 122 bp, Protomyxzoa rheumatica
cagaacactgctgttgggttctgagtgtttgttcctcacatggaattgcagaacactcctgctgttgtctgtatgtttgtccctcacttaggattccggaacaatgctacaagggtctgaat

SEQ ID NO: 4960 - DNA, 184 bp, Protomyxzoa rheumatica
ttcgattccattggatgatgattcctttccaatgctttcgatgattccatgtgatttaatttgacgatgactctattcaattcaattcaatgattccatatgattacactcaattatgattgcatttgattccattctatgattccattctattccatgcaatgataattccaatcgagtccat

SEQ ID NO: 4961 - DNA, 123 bp, Protomyxzoa rheumatica
aatgtagaaaaggaaatatctttgtataaaaactagacagtcattctcagaaactactttctgatgtgtgcgctcaattcactgagtataacctttcttttgatggaggagtttcgagacact

SEQ ID NO: 4962 - DNA, 248 bp, Protomyxzoa rheumatica
ttcattgccattcaattccattcctttcgattgccttccactttattcctctccatttgattccattccattctattccattcccgtcgattcatttccattcgattccattacattcgaggacattccattcaattcgtttcaattccagtccattccattgcagtccattccttttgagtccattccattcgggactattccactccagtcaattccattcgagcccattctattccaatccattt

SEQ ID NO: 4963 - DNA, 147 bp, Protomyxzoa rheumatica
aattccactccactacaatccattctattttacgccattccattctgttcctttgtttcgactggatctcactgtgtcacccagactggagtacagtggcacaatcataactcacatttcatttcaccattccattctttccattcc

SEQ ID NO: 4964 - DNA, 135 bp, Protomyxzoa rheumatica
gtgagttgaatgcacacatcacaatgtgttttgtgagaataattctgtctagtctctatatgaagatgtttccttttccaccacagaccttaaagcggttcaaatgtccacttgcacgttcttcaaaaagagtgt

SEQ ID NO: 4965 - DNA, 123 bp, Protomyxzoa rheumatica
cagacccagatcctcatacctgtaccagattcctacctcctcagatacagacagacccggatcttcacacttgtaccagatcctacctccttggacatagacagacccagatcctcatacctg

SEQ ID NO: 4966 - DNA, 160 bp, Protomyxzoa rheumatica
aatcctatttgagggacaaacactgagaatccagcagcatggtcccggagtcctatgggagggacaaaccttcagaccacggcagcagtgttctggaatactatgtgaaggagaaatgtttagacccacgtagcagagttctggaatcgtatgtgtggga

SEQ ID NO: 4967 - DNA, 143 bp, Protomyxzoa rheumatica
taagctgaatgctcacatcacaaagaagtttctcagaatgcttctgtctagtttgtaggtgaagatatttcattttccacattagccctcaaagcgctccagatatccacttgtagtttctacaaaatacacgaaatatccac

SEQ ID NO: 4968 - DNA, 138 bp, Protomyxzoa rheumatica
ggaaatatcttctcataaaaactagaaagaagctttgttagaaaattctttgtgatgtgtacattcatctcacagattggaacatttattttcattgagcagtttggaaaaagtctttttatagaacctgcaaaggga

SEQ ID NO: 4969 - DNA, 136 bp, Protomyxzoa rheumatica
aaattccacaaaataagtgtttcaaaactgctctatcaaaagaaaggttaaactgtaaactgaatgcaaacatcaaaaattagtttctcagaataattctgtctagtttttctatgaaggaatttccttttctacc

SEQ ID NO: 4970 - DNA, 214 bp, Protomyxzoa rheumatica
cattccattcgattccattccactcgattccactccgttcctttccattacattgttttccattctattccattccattgtattccattcgattccatttgattccattccattccattcaattctatttgaatcaatttcattgcaatccattacattcgagtccgctttattccagtccattccattctgatccattccttttgattccatt

SEQ ID NO: 4971 - DNA, 140 bp, Protomyxzoa rheumatica
atcttcacaaaaaaactacacagaagcattctgagaaactactttgtgatgagtccattcaccacacagagttgaaaatttctttgactgaacagttatgaaacacactttttgtaccgtctgcaactggatatctggag

SEQ ID NO: 4972 - DNA, 290 bp, Protomyxzoa rheumatica
cataggcctcaaagcgctccaaatatccacttgcacagtctacgaaagagtttttcaaaacttctcaaccaaaagaaagtttcatctctgtgacatgaatacacacatcacaaagaagtttctcagaatgcttctgcttatttttttgtgaagatattaccttttcccccatatgcctccaagtcctctaaatatgcacttgcagattctacaaaaaaagagattcaaaattactcaatcaaaaggaagtttcaactctgtgagacgaatgcacacatcacaaagaagtt

SEQ ID NO: 4973 - DNA, 173 bp, Protomyxzoa rheumatica
attcgattccattctatttgaataaattccattagtgaccattccatttgagtccattctatttgattcaattccattcgagcccattacatttcagtccaatccattccattcctctcctttccaatacattcgatgccactccattcaattctattccatttgagtccatt

SEQ ID NO: 4974 - DNA, 158 bp, Protomyxzoa rheumatica
ttaaactttcttttgatagagcagttttcaaaccctcatttgtggaatttgcttgtggatatttggagctttttgaggccttcattggaagcgagatatcttcatgtaaaaactacatggaagcattctcagaaactgctttgtgatgttgcattcaa

SEQ ID NO: 4975 - DNA, 125 bp, Protomyxzoa rheumatica
ctttactgagtgcatttattagtttaaatgcactatttaaatgtactatttatgttttttacatataaaattatgtcatctaccaacactgactttttttcttcttttcaatttggatcttttag

SEQ ID NO: 4976 - DNA, 171 bp, Protomyxzoa rheumatica
caaaactgcttatcaaaagataggttcaactccgagagttgaatgcacacatcacaaataagtttctaagaatgcttctgtgtattttttatgtgaaaatttccttttcctcagtacgcctcacagcgctgcaaatatccacctgcagattctacaaaaagagtgtttcaa

SEQ ID NO: 4977 - DNA, 342 bp, Protomyxzoa rheumatica
gtgtgcattttcctaaggacaaaagtgattgattccatctaatctataactaaggtctgggtcctggagaccttcctctggagcctcagtaagtttacctaatctagatggggttctggtgctggaggtgattaccgttatcttgtctccagccaaggtgtggaggtctgtaggagtttcttcagacatccaatagaagatttttaatcctaaatgcatcctggtgtgaggaatgtaagaatttctttgttatcttgttgcatttcaaggctcaggaaaggcctaggccagacttttgtttggctattgttatgttccagcctttgtgtaagggcaacttat

SEQ ID NO: 4978 - DNA, 128 bp, Protomyxzoa rheumatica
cactgtggttgagctggtatatcaggcgcaatgcagagttccctttactttcccccctgcttttctcaaacagaagtctttcaccatagctaccccggctagaaatgcactgggtctcacctgaagtt

SEQ ID NO: 4979 - DNA, 244 bp, Protomyxzoa rheumatica
acacatgatgaatcaaaaaaaaaaaaaaaaaagcttaacattgtgagatgaatccacaaatcccaaagcagtttcacagacagcttctttctatttgttatctggggatgttcggtttaccttcacaggcttgaatggactcacaatgtccctttgcagattgtacaaaatgagtgtttacaatttactgattcaaaagaaaggtttaactttgtgagatgaatccacatatcacaaagccatt

SEQ ID NO: 4980 - DNA, 142 bp, Protomyxzoa rheumatica
gtaatggaatggaatggaatggaatggaatggaatgttgaaaagaaatgtgtgttgatattgtgccactacgctacagcctgtgtgacagagagagatcctgtcgaaagaaaggagttgaatggaagggaatggaatggaat

SEQ ID NO: 4981 - DNA, 132 bp, Protomyxzoa rheumatica
ttcaactcacagagttgaacatatcttttgattgaggagtctggaatctctcattttgcagaaactgaaagtggatatttggatccttttgaggcatactgtggaaaagcaaatatcttcacataaaatcta

SEQ ID NO: 4982 - DNA, 145 bp, Protomyxzoa rheumatica
aaaaacactcagaacacagcagcagtgttctagaatcctaactgagggacaaagattcaaaccagagcaggagtgttctggcatcctttgtgaggtgcaatcattcagatccatgtagcagtgttgtggtatcctatgtgaggga

SEQ ID NO: 4983 - DNA, 163 bp, Protomyxzoa rheumatica
tatatactgtacataaaatatgaaagtaaccaaacatttagaatacactgtacataaagtatcaaagtactcaaactacatattatatacagcatataaaatgtcaaagtacccatactgtatattatatactgtacataatatatcaaagtacccgaatata

SEQ ID NO: 4984 - DNA, 425 bp, Protomyxzoa rheumatica
tctaaggccccccaacagccatctgaatggacccatcctcttggcagaggccattccggagttaacctgaaactctagttcaggccatgatgaaaacgggcttggaaatgcctcattgtacccctccagcattaacatcaatacaaacctcaagtgtaacaagaaacatttacaatctattttctctgaggcctgtgacctggtggcttcatctgcatgataaaaccttggtcttcataactgcttattgtaacacaggcattcctttctactaataataactctttcaactaatgtttaaatttacctatgatcgggaagctccccccccccaccagatcaaaccaatgaaaatcttacatattttaattgatgtctcatttctccctaaaatgtataaaagtggctgtgtgcagtggctcacg

SEQ ID NO: 4985 - DNA, 144 bp, Protomyxzoa rheumatica
acccagcagcagtgatctggaatcctatgtgatagccatacatgtagaccccagcagcaatgttctggaatcctatgtaagggacaaattttcggaccccagcagcagtgttttgcaattctatgtgtgtgacaaatattcaga

SEQ ID NO: 4986 - DNA, 124 bp, Protomyxzoa rheumatica
gatggaatggaatgcaaaggaatggtgaaaagaaatgtgagctgagattgtgatactgcactccagcttctgtgacagagtgaaatcctgtggaaagaaaggaatggaatggaatggagtggaa

SEQ ID NO: 4987 - DNA, 147 bp, Protomyxzoa rheumatica
atagcttctgtctagtttttctctgaagatacttcctttttcactttaggagtcaaagtgttcccaaataatcatctgcagattctataaaaatggtgtttctgaacagttctattcaatgaaggatttaactgtgtgagatgagtg

SEQ ID NO: 4988 - DNA, 208 bp, Protomyxzoa rheumatica
tgttgattgaccactttggaaacagtctttggaagaatttacaaatggatatttggagagcattgaggcctatgttttaaaaggaaatatattcacataaaacctagacagaagcattttgagaaacctctttgtgatgtgtgctttcatttcacagacttgaatgattcttttggctgagcagcttggaaacagtctttttgtacaa

SEQ ID NO: 4989 - DNA, 188 bp, Protomyxzoa rheumatica
tatatttccttttccaccatagacctcaaagtgttccaaatgtccacttgcagatcgtacaaaaatagtttcaaaactgcttcatcaaaaaaaaaatgtttaactctgtcagatgaattctcacatcaaaaagaattatgtcagattacttctgtctagattttatgtgaagatatttccttttctgc

SEQ ID NO: 4990 - DNA, 277 bp, Protomyxzoa rheumatica
gaaaggaatagaacgaaattgaatcagatggaaactaatggaatggaatggagtcgaatgcaatacaatcgaatgaaatggcatcgagtggaatggagtggaatggaatggaatggactcgaatgaaatagaattgaaaggaatggcatcgaatggtatggaagggaatgttatggaatggaatggaatggaaacaaatgaagtggattcaaaagcaatggactcatatagaatggactcaaaaggaatggtctcgaaaggaatttattcgaataga

SEQ ID NO: 4991 - DNA, 408 bp, Protomyxzoa rheumatica
aaacatctgagaaagagactgttacgcaaaacaatccaaaaactcttaaaactcacatctgataaaaaggctgtcacataaaatactccaaaaactcttaaaactctacagtaagaaaaccacctaataaaatagaccaaaaaccttaacagatacctcaccaatgatgagaaacatataggaaataaacatataaaagaatgcattatattgtgtaacattagggtaacatattaaaacaatgagataccgctacatacctagtagaatggccaaaatctggagcactgacaacaactgatattgagaatgtgcagcaacaggaactctcattcagactgtggaaatgcaaagcggtacagtcactcagttggaggacaatttgttcttagaaaaataaacatattc

SEQ ID NO: 4992 - DNA, 342 bp, Protomyxzoa rheumatica
agttgcagttatatagtaagtagcattttcagactgccttattttacttagtaatatgcatttaaggttcctccttatcttttgaggacaagatagcccatttctttttagtgctgaattatgttccattgtgtgtaccatagtttattcattcacttactgaaggacatcttggttgcttccaaattttagttattttgaataaagctgctataaatttctgtttacaggtttttatgctagtgtttattgtcacctcctttgggtaaataccaagaggtgcagttgctggatcatatggtaagaatatgtttacttttgtaagaacaaccaaattgtccg

SEQ ID NO: 4993 - DNA, 131 bp, Protomyxzoa rheumatica
agatcaggtttgaaacacccttttgggggaatttgcaagtgcatatatatcgtgctttgaggcctatggtagaaaaggaaataacataaaaactagacaggattgtcagaaacgattttgtgatatttgca

SEQ ID NO: 4994 - DNA, 158 bp, Protomyxzoa rheumatica
tatccacttgcagattctacaaaaacagtgtttcaaaactccacaatgaaaagtaagggtcaactctgtgagatgaatgcacacatcacagacaagtttgtcagaatgcttctatctagtttttatgtgaagatatatccttttccaccataggacac

SEQ ID NO: 4995 - DNA, 171 bp, Protomyxzoa rheumatica
ataaaaactacacagaagcattctgagaaaattcttggtgttgtgtgcattcaactcacacacttgaacctatcttttgattgagcaattttgaaaccctctgttggaagaatctgaaagtagatatctgaagcgctttggtgcctattgtggaaaaggaaatatcttcaa

SEQ ID NO: 4996 - DNA, 148 bp, Protomyxzoa rheumatica
atcgaatggaatgcaatagtatggaatgtaattgaatggcatggaatcgtatggaatggaccagaatggaattgactggaatagaatgaacccgaatgtaatggatgtcaatgtaattgatttgaatggaatgtaatcgaatggaatg

SEQ ID NO: 4997 - DNA, 253 bp, Protomyxzoa rheumatica
tctgcaaattcctctctaggagacgtgaggacccatttattatgatggccaaggccaagtccaaacaaggcaatggactttcatcagtcagcccttttcaaccactgatcttttaaactggaaacaccatactccctcctacacagagaagcctcaaggtcttatagatctgttgcaatccatctttctgacacacaatccaactgaccagactgccagcagctccttctcacgttatttaacactgaggagt

SEQ ID NO: 4998 - DNA, 147 bp, Protomyxzoa rheumatica
cagttattccagtatcatttattgaatagggaatcttttccccattgcttgtttttgccagctttgtcaaagattagatagttgtaggtatgtggtcttacttctaatttctctattccgttccactggtggatgtgtctgtttttg

SEQ ID NO: 4999 - DNA, 150 bp, Protomyxzoa rheumatica
ctcacatagcttctttctagttattctgctgtgatatttgcttttttgccattgacctcaatgagctaaaaaatgtccattctcagaatccaaagaaaaatttgctctgtgagataaatgcacacatcacaacgcagtttctcagaaagc

SEQ ID NO: 5000 - DNA, 194 bp, Protomyxzoa rheumatica
gattatgtttcaaagtcttcaaaaatagaaaattcattttatatttctagctgaaaataataacagtaattagcctacctttggggaaatgtgataaaaatattaacgaacatcaaaactcattaaaagcacaaaatgtgcaatgatttcaactacatgttctttatatgaattatacatgtagacatatagac

SEQ ID NO: 5001 - DNA, 217 bp, Protomyxzoa rheumatica
taaaataaaaaataggcagaagaattctgagaaacttctttgtgatgtgtgtgttcatcccacaaagttgaacctttattttcttgagcagtatggaaacagtctttttgtcaaagctgctagtggacttgtggagagctttgcagtttattgaataaaagaaatatcttcacattaaatcaagacagaagcaatctgagaaactactttgtgatgt

SEQ ID NO: 5002 - DNA, 142 bp, Protomyxzoa rheumatica
caatgtccctgtaggcagagacttgacaagaggtaaatcacctgggtgatcattgcagcgatgtgtcacaaagcaccctgtaggagatcctagaaaagatttacaacacctgggtgatctgtgcagagatatgtaacaatgc

SEQ ID NO: 5003 - DNA, 619 bp, Protomyxzoa rheumatica
tattcagatgacagcaggagcgttctgaaatcctaagtgaggaacaagcatttacaccacagcaggagtgttctgaaatcctatgtaaggaacaaacatttagaccactgcaggagaattctggaatcctatatgccggacaaacattcagacgacagcagaatggttctgaaatcctatgtaaggagcaaacagttagaccacaggaggagtgatatggaatcctatgttagggacaaacattcagaccctggtagcagtgttctggattcctatgtgagtaacacacttttagacccaagtggaaatgttctggaatcatacgtgagggacaaacaatcaggacccaactgcagtgttctggaattctgagtgagggacaaacagtcagtgcacagcaggggtgttctgcaatcctctgtgaaggacagacattcagacgacagtaggaatgttctgaaatcctatgtgaggtacaaacatttataccacagcaggagtgttctggaattttatgtgtgggacaaacattcagaccctcatagcagtgttttggaatcctatacgagggagaatcatttagacccacgtagctgtgtacttgaatcttacgtgaggg

SEQ ID NO: 5004 - DNA, 143 bp, Protomyxzoa rheumatica
gtgtttgtgttaatcttagtgttaggattgcagaacactgctacatgggtctaaatgattgtccttcatataggatacgagaacactactgctgtggtctcaatggttcaccctcacataggattccaaaacattcctgctgt

SEQ ID NO: 5005 - DNA, 131 bp, Protomyxzoa rheumatica
tatgtgaggaaaatacattcagaatacagcaggagtgttctggagtcctatgtgtgggacatatattcagatcctcgtagcagtgttctggaatcctatgtgagttacgaatatttagacccacatatcag

SEQ ID NO: 5006 - DNA, 124 bp, Protomyxzoa rheumatica
tttgtagaatccgcaaagggatatttcagagcccattgaagcctgtggtgaaaaaggaaatatcttcagataaacagcagaaagaagttttggagaaactgctttgtgatgtgtgcattcatct

SEQ ID NO: 5007 - DNA, 269 bp, Protomyxzoa rheumatica
atatatgtgacaatctcacatttgagtagtcagcaagcaggagggtctcatcacctgggtcattgtcagggatacgtcacattctcccctgaggacagggacaaggcaagaaagtcacatccctaggtattctgccagggatatgttcttgttccctcctgaaagcatgacacatgcagcagagtcacctcacctgggttctgggcccagcgatatgtcacaattttccctgtgagaaaggcacaggcaggagaaacacatcacctgtt

SEQ ID NO: 5008 - DNA, 146 bp, Protomyxzoa rheumatica
cgatagagcagttttgaaacacacttttgcacaattgccaagtgcatatatagagtgctttgaagcctaaggtagaaaacgaaatatcttcatgtaaaaactagacagaatcattctcaaaaacaactttgtgatgtatgcgttca

SEQ ID NO: 5009 - DNA, 140 bp, Protomyxzoa rheumatica
aacctcaggttttgctcttaaggccctctgctgattggatgagatccacccacattatcaagtataatttcctttacttaaagccaactgattgtatgtgttaactacatctaccaaataccttcgcagaaacgcctaga

SEQ ID NO: 5010 - DNA, 145 bp, Protomyxzoa rheumatica
agtgcagagatatgtcccaatgtcactctaggcagagcttagaaaacagtcacatctcctgggtgatcaatgcagagataagtcacaatgcccccgtaggcagatcctagacaagagttacataacccgggtgatccgtgcagag

SEQ ID NO: 5011 - DNA, 207 bp, Protomyxzoa rheumatica
agtatataataatatacagtttgggtaatttgatattttaggtacagtgtatgatatatagtttgagtactttgatattttatgtagagtttattataaatgttttgttactttcatattttatgtacagtatacaatgcatattttgggtactttgatattttatgtacagtagataatacataatttgggtactttgatatttta

SEQ ID NO: 5012 - DNA, 238 bp, Protomyxzoa rheumatica
ttttgtagaatctgcaactggatagttggatctatttgtgggattcctttgaaaagtgatttcctcttttaaaactagacagaagaattcttggaaacttctttgtgatgcctgcactcaactcacagagttgaaacttccgttcgatagagcagttttgaaatactatttttgaagaattttcaagtggatatttactgcggttcgaagcctatggtagaaaaggaaatatcttcat

SEQ ID NO: 5013 - DNA, 129 bp, Protomyxzoa rheumatica
ctcacataggattccagaacactgctacaagcctctgaatggttgtcccgcacataggactccagaagattcctgatgtgttctgaatgtgttttcctcacatgcgattccagatcaattctaattgtg

SEQ ID NO: 5014 - DNA, 139 bp, Protomyxzoa rheumatica
ccattccattccaatcccttccattccactcctttctttcgacaggatctccctctctcacacagcctgtagcgctgtggcacaatctcaacacatatttcttttcaccattccattccattccaatccattccactcc

SEQ ID NO: 5015 - DNA, 179 bp, Protomyxzoa rheumatica
cagggaggtgatttctaatggtttagcatcatctccctagtattgtctcatgattgagctctcacgagatctggttgtttaaaagtgtatagcaccccactccacttcactctgtcttcctcctgctccggccatgtaggacttgccagcttcctcttcaccttctgccatgattgtaa

SEQ ID NO: 5016 - DNA, 139 bp, Protomyxzoa rheumatica
tacctcagcctcccaagtagctgggaccactggcgcataccaccaaaaccagctatttttttttttaaatagagacatggtctcactacgttgctcaggctttgtctgttctcacattgctataaagaactacctgaca

SEQ ID NO: 5017 - DNA, 349 bp, Protomyxzoa rheumatica
cagaaagaaagccagagcagtgctaccagggtctgaatatttgtccctcacataggattcaaggaccctgctgctggggcctaaatgtttgtccttcaaataggattccagaacactactacgagagtctgaatgtttgttcctcacaggggattccagaacacttctgctgtggtctgaatgtttgtcactcacatgggattccacatcactgctatgagtgtctgaatgtttgtccctcacaaagaattccagaacactgctacgagggtctttatgactgtccatcacataggataccagaacactgcagctggggtctgaatgtttgtccctcacacaggattcc

SEQ ID NO: 5018 - DNA, 868 bp, Protomyxzoa rheumatica
aacgctctttgggctgcggtaagcatacctaatgccatttgattttgcaacacaacagtacacaactgagcaaattcctctgataacaacataagtccagtgctactaccattaagagctttttctacatgtaagcttaatatttaaattttttgctgaagcagaattgtatcagtggcagaggagaacactgttatagggttcaccccatcagggattctggcgcatttgtaaccagtgatgtttggaagcatctagatttaggaaagaggttgtgtttcattggggacaatgctgttgatttggagtatgtgttgacaattgtctggtgggagaaaccccagagtaacattaaaagagccatttaaggcctccagacaaaggtggggtgcggtgccatatggagttcagctaccggtatggtaggttccctgtatatgtctttccaggtatattgggtaggatacaaaggcctttgatgcattgcaaaagtggatttctccttttgtcagacttgggcaaaaatagactctttgatttggttaaaagaagtccaggtgggattacaggtgctattctcctgacccccttggtagtgatgtaaccacttggaaatgttggcagagacaattttttaagggagcccattccctgcagcctgtggcaattcgactataaggcagcactaactgcagttgacttcttttgcagcggtggctacccagttgctaaatgcattcttggcctcagacacaaagaagcaggtgctgaccatcattcgataggctattccttttaataacaaaaacagaggggaacataacattgtttttaaaattttactactcccctcatttcctgcccccat

SEQ ID NO: 5019 - DNA, 144 bp, Protomyxzoa rheumatica
gcagttttgaatctctatttttgcagaatctgcaggaggatattcggagggctttgaagcctactgtggaaatcaaatatcttcccaaaaaactgcacaaaagcattctgagaaactcctttgtcatttgtactttcaactcac

SEQ ID NO: 5020 - DNA, 215 bp, Protomyxzoa rheumatica
gggtccactttctgttccagccctgccagatccaccctcttctatggcttcacccaggtctggcctcaccctagaatcttttctcacagaactgattcaaggagatcagagatttgggcgggggctcctgctgcctcagaactgattaaaggagaccagagattcgggcgggggctcctgctgcctcctgagctggtgcccacaatttcctaaag

SEQ ID NO: 5021 - DNA, 152 bp, Protomyxzoa rheumatica
acactggcagctgggtgctaagttttctgtaattttcaggatttaaatgacaggcctagcatttctattttttcttccattttaaaaagtatttacctgaaaaacaaaatgtgcagaataaaagctatgtcgacagatgcaagggatagaga

SEQ ID NO: 5022 - DNA, 232 bp, Protomyxzoa rheumatica
ccgttccattccattttggttaattccattccagtccattccattctatacctttccattccacatcggttgattccattccattccattgcactccattccactccattccattcctttgcagtcgtgttgtttacattcaattctattccattgcattcctttcctttccactacactcgggttgactcccttccattccattccattccattccatcccattccattcc

SEQ ID NO: 5023 - DNA, 190 bp, Protomyxzoa rheumatica
attccattagattccattcgatgattctgttggattccattctttgttttattttgatttttttgatggtgatttctttctctttctttcaatgatcccatccaattctattccatgatgattccattcgatcccttttgatgaaaattccattcgattccattcgatgattcccttcgattccatccaa

SEQ ID NO: 5024 - DNA, 125 bp, Protomyxzoa rheumatica
attccattagagtccattcgatgattccattcggttacatttgatgatgattccattggattgcattctaggtttccatttgattccattcattgactattcctttcgattccattcgatgatgg

SEQ ID NO: 5025 - DNA, 273 bp, Protomyxzoa rheumatica
tgcggcctatggtagaaaaggaaatatcttcacataaaatctagacagtagcaatctgaggaacccctttgttatgtgtgcattcatctcccagagataaacctttcttttgattgagcagttttgaaactctttttgtaaaatctgcaagtggacattttgagcactttgaggccaaaggtggaaaaggaaatatcttcacataaaaactagagaaaagaattttgagaaacttgtttgtgatgagtgggttcaactcacggcgttgaacct

SEQ ID NO: 5026 - DNA, 356 bp, Protomyxzoa rheumatica
gaatggaatggaaaggagtgtagtggaatggagtggagtggagtggaatggagaggagtggaatggagtggggtggggtggattggagtgcagtggagtggaatgcagtggattggagtgtaatggaatggagtggaatgcaacggaacagagcagaatgcaacagaacggaatggaacagagtggagtggagtagagttgagtggagtggatcagactgcagtgtaatggagtggaatggaatttaaagtaatcgagaggactggagtggagtggagtttactggagtgcagtggaatagagtggattagagtagcgtggagcggagttgagtggaatggagtggaatggaatgc

SEQ ID NO: 5027 - DNA, 140 bp, Protomyxzoa rheumatica
taggcttattctttcttaaatcacaacaaaaatattgtcaataggtagtttccttaggttagcatgccagtcccttttatctttctgggattgttgtaatagcaaaagatatcagagttgaccccacttgggacattggg

SEQ ID NO: 5028 - DNA, 321 bp, Protomyxzoa rheumatica
gatgatgattccattcttttctgttcgatgattcctttcgattccattcaatgattattctattcaattccatttgattatgattccattcgattccattcggtgatgattccgtttgtgtccattcaatgtttccattcgattccatttgatgatcattccacttgtgtccgttagatgattccatgtgattccattcgatgatgattccattcactgccatttgattattccatttgatttcattcgatgaagattccattgatttcgtttgatgattcctttccattcctttcaatgattattgcattcgagtccatt

SEQ ID NO: 5029 - DNA, 155 bp, Protomyxzoa rheumatica
caaagtacaccaaatatatattctatactgtatatcaattttcaaagtacatgaaatacatattctatactgtccataaaatatcaaagtacaccaaatatatattctatccggtacataaaatatcaaatcacccatacgatatattatatact

SEQ ID NO: 5030 - DNA, 132 bp, Protomyxzoa rheumatica
atccaatggaatcatcatcaaatagaaacgaatcgaatcatcgaatggagttgaatggaataatcattgaatggaatctatggaatcatcgaatggactcgtatgaattcatcaacgaatgaaatcgaatgt

SEQ ID NO: 5031 - DNA, 180 bp, Protomyxzoa rheumatica
catgtgcaaatttggtttaagggtaaatagcatggtgcttaagtttgggcttctattggtcccatcaaccagatagcgaacatagtacctaataggaagcttctcaggtcttgtgccattccctcctccctcctttgaagtccttagtgtctattgttcccaagtttatgtctgtgtgta

SEQ ID NO: 5032 - DNA, 154 bp, Protomyxzoa rheumatica
ggaaagaatggaatcatcaaatggacatgaatggaatcatcatggaatggaagcgaatggaatcatcaaatggcatagaatgcaatcatcatcatatggaatcaaatggaaaaatcgaatgtactcaaatggaatcatcgaacggacatgagcg

SEQ ID NO: 5033 - DNA, 249 bp, Protomyxzoa rheumatica
catcaactgggtgatcagtgcagagatatgtgaggattccggtgaagggagactctagaccagtgttacatcacctagatgatcagtgcaggtataactcaaaaagcctcctgtaggcagagcgtagactagagttccctccccagggtgaacagttcagagatgtgtcacaaagcccatttaggcagagcctaggcaagagtttcatcacttggttgatcaggtcagagatgtgtcaaaatgtccatg

SEQ ID NO: 5034 - DNA, 171 bp, Protomyxzoa rheumatica
aggtgggaggatcacttgaacccataagggtgaggctgcagtgagccgtgatcataccactgcattccagcctgagcaacagagagagaccctatctgaaaaataaaaagaaagaaacaaagaaaagaaagaaagagagagagaggagaaggaagaaagaagaagaaagag

SEQ ID NO: 5035 - DNA, 209 bp, Protomyxzoa rheumatica
agtgttctggaatcctatgtgagcatcaaccattcagaccactgcagtagtgttctggaatccgatgtgaagagcaaacattctgagcctcgtagcattgttctgtaatcttatctgagggataaacattcagactctcttggcagtgttctggaatattatgtgaggaacaaatattcagaccctcgtagcagtgttctggaatccta

SEQ ID NO: 5036 - DNA, 141 bp, Protomyxzoa rheumatica
attctcagaaacttctttgtgatgtgtgcattcagctcacagagttgaacttatcttttcacagagcaggtttagaactctccttttgtataatctggaagtagatatttggagggctttgaggcctgtggtggaaaagga

SEQ ID NO: 5037 - DNA, 402 bp, Protomyxzoa rheumatica
caaatgctgcgagggtccgaatgtttgtccctcacatgggattctagaatactgctgcgagagtctaaatgtctgtccctcacataagattccagcacactgttatgaggttctgaatgtttgtccctcacttaggtttccagaacactgctgctgtggtctgtatgtttgtccctcacaaaggattccagaacagtcctgctgtggtctgattgtttgttcttcacataggattccagaacactgctgcgaggctctgaatgtccttcacataggaatccagaacactgctgccgttgtctgaatctttgtccttcacataggattccagaagccttctgctggtgtctgaatgtttttccctcatctaggattcctgaacactgctgcgagggtctgaat

SEQ ID NO: 5038 - DNA, 227 bp, Protomyxzoa rheumatica
ctgttatggaatcctaagtgaggaacaaacattcagtccaaagcagtagcgttctggaatactaagtgagtacaacattcagacaacagcagcagtgttctggaatcttgtttgagggacaaactttcagatcctcttagcagcgttctcaaatcccatatgtggggcaaacattctgtcccacgtagcagtgttctggaatagtacgtgagggaaaaaccctcaat

SEQ ID NO: 5039 - DNA, 686 bp, Protomyxzoa rheumatica
cctttccactccatttcactccactccattccattccactcaactgcactgcacttcactacactccattccattccaccacactccactccattctattcctttaccattcattccattccatttcacttcagtcaattccattccattccactcaactccaatccactccacttcttcccattagaattatttctttcgacaggatctccctctatcacacaggctgtagcgcagtggcacaatctcagcaccaattccattccattccattccactcagttccattccattccattcaattccactgaactccactccacgcaactccattccattccagtccactacattccattccattccattccactccactccattgcactgctctccaccccactccactccaatccattccactccactccattccattccattccactccactccgttacattaatctccaattccactccactccactccacaacactccactccactccttcccattccactcctttcttttgacaggttcccctactgtcacataggctgtagcacagtggcacagtctaagtatccatttcattccattccattccattcaactccatttcactccactccactccactctattccattccactccactccactccactccattccattcc

SEQ ID NO: 5040 - DNA, 138 bp, Protomyxzoa rheumatica
tataatgtcctggtgcgccattttttaaacccgtcagaaaagtgcagtatttggctgggagttacccaattttcgaggtgccatctgtcacctctttctttgactaagaaagggaactccctgaccccttgtgcttcc

SEQ ID NO: 5041 - DNA, 258 bp, Protomyxzoa rheumatica
cattcattgcaatggaatggattggaatggacctgaatataacagattggaatggaatggactcaaatagaatggactcaaaagaaatgttctcgaatggaatttattgaaatagaatggaatcaaatggaatgcaattgtatggtatggaatcgaatggaatggaaatgaatggaaaggacagtaatggaatggactggaatagaacggactcgaattaaatggattacaatgtaattgattcgaatggaatggaat

SEQ ID NO: 5042 - DNA, 308 bp, Protomyxzoa rheumatica
ggagtggaatggagtggaatggaatgggctggaatggaatagaatggagtggagtggagggaaattgattggaatggaaaggaatgggaaggaaaggaattgaatggaatggagtgcaatgtatttgagtgcaatgcattggatttgattggaatggagttgagtggaggggagacgagtggagtggagtggaatgaaatggattggaatggaattgaatcaaatggaatggactggaatggattggattccaatggaatgggctggaatggattggactcaaaaggaatggactcaaatggaatgga

SEQ ID NO: 5043 - DNA, 177 bp, Protomyxzoa rheumatica
gagaaactactttttatgtgtgcattcatctcacagagttgaatctatgttatggtttagcagttttcaaacactctctttgtagaatctacaagtggatccttggaacgatttgaggcatattgtggaaaaggaagtatgttcacataaaaactacacaaaagcattctgagaaag

SEQ ID NO: 5044 - DNA, 241 bp, Protomyxzoa rheumatica
gaatctgcaagtggatatttagagcctgttgcagcctgtggtggaaaatgtaatatcttcgcttaaaagctacacagaagcattctgaaaaaatttcttggttatgtgtgcattcatttcacagagttcaacatttcttttgattgagcgttttgaaacactatttttgtagaatcttcaagtggatatttggagccttttgagtcctgtgttggaaaaggaaatatcttcacagaaaaac

SEQ ID NO: 5045 - DNA, 381 bp, Protomyxzoa rheumatica
agcctggcttttgtatcctctgagttgcatcccagcctagcagcagttatgggactccaacttagttctggttaagttttatgtaaatattcttgtatctgttttacctggctctactacacaaaatgtctagaaaaaagtaaagggcgactagaataaaggtgagattatagatatcggaatgagacacactgattctgtggagatagagggagaacaacaacctggaacgtgggaaatgaacaacttagacctcggaagctacggggaatggtgggacattaacaactttttttctttctgaataacccctggtgcagcccacaaaagagtctggaaatactattagaacagacggtaagacagaggctgtggattcag

SEQ ID NO: 5046 - DNA, 126 bp, Protomyxzoa rheumatica
ttccattcgattccatttgatgattccattcacgttcatttgatcattatagtcgagtatattcagtgattccactggatttctttcgatgatgattacatttgattccattcaatgatgattcca

SEQ ID NO: 5047 - DNA, 191 bp, Protomyxzoa rheumatica
attccattcgagtacattccattcacttcccttccattccaatctattctattggagtccattccattcgattaagttcccttttattacattcgatttcattcaattctattccattggactgtattgcattcaatttctttgcaatcaattccattcctttacattaaatcctattctattcaagtcca

SEQ ID NO: 5048 - DNA, 141 bp, Protomyxzoa rheumatica
ttcacataaaaactagacagaagaattctcaggaaattgtttgtgatgtgtgcattcaggtaacagagttgaacatttcttttgacagagcagttttgaaacgctcttttggtaaattatgcaagtgctcattttgagcac

SEQ ID NO: 5049 - DNA, 195 bp, Protomyxzoa rheumatica
ggcctcaaagcgctccaaatgaacacttgcaggttatacagaaagaatgtttcaatgctgtgctataaaaagaaaggttcaactctgtgagtagtattcacacataacacagaactttctgagaatacttctgcctggtttttttttctgaaaatagcccgtttccaacgtattcctcaaaaagtttcatatatc

SEQ ID NO: 5050 - DNA, 264 bp, Protomyxzoa rheumatica
ttcaagaagactgcgacgaggatctgaatgtttgcccgtaacaaaggattccagaacattcccgctgtgattttaatgttcgtccctcacataggattccagaacaatgctgctggggtctaaatatttgtccgtcacaaaggattctagaacactgctatgattgtctcaatgtttttctctcacataagattctagaacactatactgagggtcctaatgtttgtccttcccacaggattccagaacactgctcctgttgtc

SEQ ID NO: 5051 - DNA, 194 bp, Protomyxzoa rheumatica
ccgcgttcatcaccttaaatatgtgaccctcatcttctgcgtggccatgtttacagaagggagaatgggttattcctagacccagcacacagatcatgtgattctgcatcctggtctcttcagagggttcattttgacatatctccagactcatcaactagatgatgtgacggtcctcttctccctgaaaccta

SEQ ID NO: 5052 - DNA, 150 bp, Protomyxzoa rheumatica
agggcagagatatgtcacaatgccactgtaggcagagcttagaaaatatttacatgatctaggtgatcagtgccgagatacatcgcaatgtccctgtaggtagagccttggcaagtggtccatcagctgggtgatcattgcaggtatata

SEQ ID NO: 5053 - DNA, 237 bp, Protomyxzoa rheumatica
tcctttccattcaagtccattcaattccattcatgtacattcatatccgttccattccattcaattacattaaattcgattcctttccatgtgactccattccattccaatacattagagtccattcctttctattcgatgccatgccattccattcaagtcctttctcctccattccattctactagagtgcattccatttcattcgaatccattccattccattcaattccattc

SEQ ID NO: 5054 - DNA, 125 bp, Protomyxzoa rheumatica
tatttggatagatttaaagatttcgtcggaaacggggatgtcttaatataaaatctagaccgaagcattctccgaaacctctttgtgatatatgcattgaagttacagagttgaatattcccttt

SEQ ID NO: 5055 - DNA, 178 bp, Protomyxzoa rheumatica
gtgtactttttatgagaagatatttccttttctaccataggccacaaaatgctccaaatatacactggcggattacagaaaaagagagtttcaaactgctcaatcaaataaaggtgcaaatctgtgagatgaatgctcacattacaaagaagtttctcagaatgcttctgtgtagttt

SEQ ID NO: 5056 - DNA, 162 bp, Protomyxzoa rheumatica
gattccattctattcaacactgttccactcctctccattcctttctagtccattccattatagtccattcaattctagtgaattccattctattctattgtatttcattccattcccttcctttcatttccattccattccattccattccattccattcca

SEQ ID NO: 5057 - DNA, 157 bp, Protomyxzoa rheumatica
tggaatggaatagaaaggaatggaatcgaatggcatggaatcgaatgggatcaaatggaatcgaatggaatgctgacagttggagtcgagtggaatggagtggaatggaatagaggggagtggagcggtttgtaatggagtggagctgaatgaaatt

SEQ ID NO: 5058 - DNA, 188 bp, Protomyxzoa rheumatica
tggaaacagtctttttgtacaatctgcaaaggtatatttctgagccatttgaggcttatggtgaaaacgaaatatctgcacataaaaacctgacagaagcattctgaaaaacttctttgtgatgtgtccattcatgtcacagagttgaacctctcttttgattgagcagtttggaagcagtcgttttg

SEQ ID NO: 5059 - DNA, 155 bp, Protomyxzoa rheumatica
gggcagtatttggttttctgttcctccattagtttgcttagggtaatggcttccacttgcatccatgttgctgcaaaagacatgatttcagggaatgaaatttttttaaagttcaaagacatccatagcagagttggcttcctgaccaatacaat

SEQ ID NO: 5060 - DNA, 127 bp, Protomyxzoa rheumatica
gtgatgtgtgaattcaactcacatggttgaacatctcttttgatagagcagctttgaaacactgtttttgtagggtctgcaagtggacatttgaagagctttaaggcctgcggtggaaaaggaaata

SEQ ID NO: 5061 - DNA, 354 bp, Protomyxzoa rheumatica
atcctatgtgagggacaaacattagaaccatgtagctgtgttctggaagcctttgtgagggacaaacattcagcacccaacagcagtgttctggaatcctaagtgagggacaaatattcagaccaaaacaggagtgttctggaatcctatgtgcaggacacacattcataccccatagcagtgttctagaatcctatctgagggacaaagatttatacccacgcagcagtgtgatatgagcacagcaggaatgatctggaatcctatgtgagggacaaacattcacaccacatcaggagcgttctggaatcctatgtgagggacaaatattcagatgacagcaggagcgttctg

SEQ ID NO: 5062 - DNA, 195 bp, Protomyxzoa rheumatica
atggaatggaatggaatgtattcgaatggaatagaaccgagtggaatggagttgggacaaaatggaatagaactcagtgcaatcgaatggaaagaaatggaatttaatggaatggaaggtaatagactcgaatggaatggagtataatgaaatggaatcaaatggaatggaatcgaatggaatacaattgaatgg

SEQ ID NO: 5063 - DNA, 143 bp, Protomyxzoa rheumatica
ccatttcattctgctcctttccattccattccagtcgtttccattcattcgagtcaattgccctccagtccattgcattggaatccattccattcgagtccattgcattcgagtccattccattcaagtccattccattccat

SEQ ID NO: 5064 - DNA, 397 bp, Protomyxzoa rheumatica
ccacagcaggagtgttctggagtcctatgtgagggacaaacattcagaacactgcaggagtgttctgatttcctatatggggaacaaacattctgaccacagcaggcgtgttttggaatcctatgtgaggatcaaacattcagaccacagcaggagtgttttgtaatcctgtctgagggacaaacattgagacccttgtagctgtgttctggaatcgtatgtgaagaacaaactttcagaccacagcaggagtgttctggaaacctgtgtgagggagaaacattcagaccactgcaggagtgttctgcaatcctatgtgagggacaaacactcattccacagcaccagtgttctggaatgttatttgaggggcaaacattcagaccatagaagaaga

SEQ ID NO: 5065 - DNA, 167 bp, Protomyxzoa rheumatica
acgctcacgtatttattgtagctttacttacaaaaatcaataggttaaagcaatccatacttccctcaacaaacaaatgaatgggtacaatttggaatataaaaacaatagaatattacccagcttttgaaaagcagaaaaccttttatctataataaaaataaaat

SEQ ID NO: 5066 - DNA, 148 bp, Protomyxzoa rheumatica
tgtttgtccctcacgcaggattccagaacactcttgctgtggtttgaatgtttgccctcacataggattcgagaacactcctgctgtggtgggaatgtttgtctctcaagtaggatttcagaaaactgttatgagggtctgaatgttt

SEQ ID NO: 5067 - DNA, 183 bp, Protomyxzoa rheumatica
atcaaattgaatggaatggactcgaatgcaatagactcgaatgtaatagaaaagaatggaatggcattgaatggaatggtatgcaatggaatggactcaaatagaatggactcgaaaaaaatggtctcctttggaatttattcgtacataatggaattaaatggaatgcaatagtacggaatg

SEQ ID NO: 5068 - DNA, 134 bp, Protomyxzoa rheumatica
tttattctttgttatggctgcatggtattcaatggtggatatgtaccacattttctttattcagttcactggtgatgggcaccttaggttgactgcatgtgtttgctattgtgaatagtgctacgatgaacgtg

SEQ ID NO: 5069 - DNA, 129 bp, Protomyxzoa rheumatica
attagttcagccaccgtggaaagcagtttggacatttctcaaagaacttaaaacagaaataccattcatccagccatcccattactgggtagacatccaaaagaaaacaaattattctaccaaaagaca

SEQ ID NO: 5070 - DNA, 135 bp, Protomyxzoa rheumatica
tttaacctttcttttgatagaacagttttgaaacgctctttttgtagaatctacaagtgaatatttggacttttttgaggccttctttgaaaacaggtttttttcatataatactggacagaagaattctcagaa

SEQ ID NO: 5071 - DNA, 153 bp, Protomyxzoa rheumatica
gtgagtttaatgtacacatcacaaggcattttctcagctagcttccttctagttttcatcctgagattttagctttttcaccattggccacaatgagctcccaaatgtctattctcagagtagacaaaaacagtgtttgcaaattgttgaaat

SEQ ID NO: 5072 - DNA, 185 bp, Protomyxzoa rheumatica
cacttacattgcaatccattacattcgagtctgttctattcctgtgtattccattccattccactctattctgttccattccatttgatgctattccatagttttgcattccattccattccattaaattcgacttgattaaattccattcgagcccattgttttctaatccattctattaaagt

SEQ ID NO: 5073 - DNA, 176 bp, Protomyxzoa rheumatica
tgtcagaaaaggaaataacttcacataaaatctagacagaagaaagttgagaaacttctctgtgaggtgtgcattcatctcatggagttaaacctttcttttgattgagctgttttgaaactctttttttgaagtatttgaacgtggacatttagagtgcttaaatgcctctggtg

SEQ ID NO: 5074 - DNA, 202 bp, Protomyxzoa rheumatica
atcacaaagaagtatcacagaatgcttctgtctaattttattgtgaaaatatttcattttccaccatatgcctcaaagcactacaaatatccacttgccgactgtagaaaaagagtgtttcaaaagtggtgaataaaaagaaaatttcaacgctgtgagatgaatgcatatatcacaaagatgtttctcagaatgcttctgt

SEQ ID NO: 5075 - DNA, 146 bp, Protomyxzoa rheumatica
ttttgattgagcagttttgaaatgccctttttttggaatctgcaagtggatattttgagtgctttgtggtctctgttggaaaaggaaatatcttcacataaagtagacagaagcattctgagaaacttccttgtgatgtgtgcatt

SEQ ID NO: 5076 - DNA, 129 bp, Protomyxzoa rheumatica
aagcactccaaatgtctgcttgcagattctacaaaaagagcagtttccaaactgctacatcaaaagaaatgttcaactctttgaggttaatgcacgcattacatagaagtttctcaaaattattctgtc

SEQ ID NO: 5077 - DNA, 130 bp, Protomyxzoa rheumatica
cacataaaaactagacagaagcattgtcagaaactactttatgatatttgcattcaactcaaaatgttgaacattcctcttgaaaaagctgttttgaaacactctttttgtagtatctgcaagtggatat

SEQ ID NO: 5078 - DNA, 394 bp, Protomyxzoa rheumatica
atcctgctgtgttctgaaggtttgtcccatacatagggttacagagaactgctgcagtgttatgagtgattctccctcacatagaattccagaacagtatgacgagggtctgaatgttcagccgtaaaataggattccgtaacactctcgatgttgtttaaatgtttgtcctgcacatagcattccagaacactgctacttgtgtctgaatgtttgtcccatacatagtattccagaatctgctatgattgtctgaatgtcactcacctaggatttcagaacactgctcgtcagatataaatatttatccatcacaggattccagaacactgctaagaggttctgaatgtttgttcttcacagtggattccagaacactcctgctgtggtctga

SEQ ID NO: 5079 - DNA, 271 bp, Protomyxzoa rheumatica
agaagtttctcagaattcttctgtctagttttcatgtgaaggtatttccttttccactatagacctcaaatcactccaaatgtccagttgcaggatctacgaaaagagagtttcaaaactgcttcatcaaaagaaatgtttaactctgtgaggtgaatgctcacatcacaaagcattttctcagaagttctttctagtttttatttgtagatatttttgttttcgccataggcctcaatgagctcttaaatgtccctttgcagattttcca

SEQ ID NO: 5080 - DNA, 156 bp, Protomyxzoa rheumatica
aaagataggttcaactctgtgagttgaatgcacgtatcccaaagtagtttctcagaatgtttctgtatagtttttatgtgaagatatttgcttttctacagtaagcctccaagggtccaaatatttacctgtagattctgcaaaaagagtgattca

SEQ ID NO: 5081 - DNA, 197 bp, Protomyxzoa rheumatica
agctatcattgtgccaccgcacttcattcagcctgggtaatggagcaagaccccatctctaaaaaaaatgaaaaattaaaaataaatcaaataaaaaaaaaacaggagagggagttctgtaaggttacatttggtgaagtcaatgtgtaagctcaaatgatttaatatcaatttgttactcattaggtaagagcatc

SEQ ID NO: 5082 - DNA, 171 bp, Protomyxzoa rheumatica
gggtgatcagtgcagaaatatgtcacaaagcacctgtaggccgagcctagacaagagttacgtctcctgtgtgatcagtgcaaatatatgtcacaaagccccctctaaacaaatcccagaaaattgttacttcacctgggtgatcagtggagatatctgtcacaattcctc

SEQ ID NO: 5083 - DNA, 145 bp, Protomyxzoa rheumatica
gattcctatgtgacggacatacatgtagaccccagcagcagcgttctggaatcctatgtgagggaaaaacattcaggcaccagcagcagagttctggaatcctatatgaaggacaatcattcagaccctcgtaacagtgttctgg

SEQ ID NO: 5084 - DNA, 652 bp, Protomyxzoa rheumatica
catgggaaatgcatgacgtcacccaaatatttacgaacaggcttgtgctgccagagaccccagatcacttttcctgcctcctgctaaataaatgggggcagtagatttgcatcggtttccacattacattactcataactgtggccttcctaatctctcatgtccctaaacacttattacaatgtctcaacagccttctctcagcctctcaaaatattagtcatcatgaaaataaatgtctgatgttaaagcatcagaggtcaattgtattgtgacacctaaaatttcatgcagcaccccaccatgtcctcagcctaatggctttcatgcccccaccagactgcaaaactctgaattagtcaagcacatccctgaagggaccaggggttaccccaccctctgatttctaccaagcctgcctcccacaccctctgttccagagtgcaagcctgggtagacctgcataaatgcagtgtcatccccctggctgagtatgtgtgacgagtaaattactgggaatttcgtctgctcagtgtttgttttgtctgcagccattcccagaattctagggcaagactagcttcttcgccaatggggtgaacaggaagggacccgagtgggaattgcgttttttaaaaaatcccttcccacc

SEQ ID NO: 5085 - DNA, 168 bp, Protomyxzoa rheumatica
tgtctgatgttaaagcatcagggtcaattgtactgtgacacctaaaatttcatgctgcatcccaccaggtcctcagcctaatggctttcatgcccccaacagactgctaaactctttgaattagtcaagcatatccctcaagggacaaggggttaccccaccctctga

SEQ ID NO: 5086 - DNA, 172 bp, Protomyxzoa rheumatica
aaaggactggaatggaatggattcgaatggaatggactgtattgaaatggattcgaatggaatagaaacaaatggaatagaatggaaacgaataaaatggaatggaatcatttggaacggcatggaatggaaggagtcaaatggaatagaatcaaatggaatggcattgaat

SEQ ID NO: 5087 - DNA, 162 bp, Protomyxzoa rheumatica
attcgacaccattccattccattcagtccaattgcattacatattcgaataaattccattcgagaccatttcattcgtgtccattctatttgagtccattatattccagaccaatacatttgggtccattccattctattccattccattcaataccattcc

SEQ ID NO: 5088 - DNA, 123 bp, Protomyxzoa rheumatica
atcgaatgcaatgtaatcaaatggaacggaatcgaatggcatgcattggaatggaatggactggaacaaaagtgaatcaaacagataggaatcaaacaaaacggaaaggaatggaattgaatg

SEQ ID NO: 5089 - DNA, 150 bp, Protomyxzoa rheumatica
tttgtaatgtgtgccttcatctcccagagttgaaactttcttttgatgaactagttttgaggtactctttttgtagaatctgcaactggacatttctagtgccttgaggactatggtggaaaatgaaatatcttcacataaaaactagac

SEQ ID NO: 5090 - DNA, 153 bp, Protomyxzoa rheumatica
aatggaatcaacgcaattgcaaaggaatggaatggaattgaatggagtcaaccgtagtggaaatcaatggaatggaagggattgggaaagaatggaatggaatggactggaacggaatcaatccgactggtattgaaaggaatatgttggaat

SEQ ID NO: 5091 - DNA, 125 bp, Protomyxzoa rheumatica
tcccttcacagattctacaaaaacagtgttttcattctgatcaatctaaagagagttttaactctgtgtgatcaatgcactaatcaccaagcagtttctcagataccttctgtcttctttgaaga

SEQ ID NO: 5092 - DNA, 646 bp, Protomyxzoa rheumatica
caccgggctgcaggactacaatcccagcatgcacccagctcagggacagtgcgcattactggaggaaaaggctaggctgtggacccctccttctgcttcctgggagaggtagtttcatggagactcccagaactttcatcacagggatgcaggactaccatcccagtatgcactggggtcagggacagtccgcgtcagtggaaaaagaggcggggctgtgtgcgtcttcctaggcttgctgggagatatatgctcataaacactcccagccctttggtcgcagagcttcaggactacaatcttagcatgcacctgtctcagggacaatgcgtatcactgggggaagaggcggggctgtgtgctcctccctaggattgctgggagttgtattctcataaacactcccagccctttggtcaaatggctacaggactacaatcccagcatgcgccagtctccggggtaaggcatagccctggaagaaggggcaaagttgtacatgccccacctaatatgctgggagctgtagtccgttaactgctctcagcctatttgtcggtgggcttcagaaccataatctcagcatataccgggatccggggtgcatagacctggagggagagacagagcggtgtggacttcccag

SEQ ID NO: 5093 - DNA, 126 bp, Protomyxzoa rheumatica
gatacgtgcgttcatctcacagagttgaacccttcttttgatagagcagaatggaaacactctttttgtagagtctgcaaatggacatttggagcgcttttcggccaatggcagaaaaggaaatat

SEQ ID NO: 5094 - DNA, 153 bp, Protomyxzoa rheumatica
tgcacactgggacattttgttgaggctagatgagcacacactggggcactatgatgaggcttggtgagtgcacactgggaccctatgatgagggtaggtgagtgcacactgggacaccatgatgagggtatgtgagtgcacactggggcacta

SEQ ID NO: 5095 - DNA, 152 bp, Protomyxzoa rheumatica
atcattgaatggcattgaatagcatcatcaatgaatggcacctaagggaagaatcaaatggactcgaatggaatcatggaaaggactcgagtggaatcatcatcgtatggaatcttcgaatggactccaatggaattatcatcgaatggaat

SEQ ID NO: 5096 - DNA, 526 bp, Protomyxzoa rheumatica
gaatagaatagaatggaatagaaaggaatggaatggaatggaatgaaatgtaatggactggacttaaaatggaatagaatggaatggaatggaaaggactagaagggaatggaatggaatggacacgaatggaatggaatggactcgaaaggaaggggatggaatgtaatagaatggactctaatggaagggaatctaatggaattgaatggacttgaatggaatggaatggaatggactcgaatggaatggaatgcaatcgaatggactcaaatggaatggaatgcaattgagtagaaaataattgaatggcatggactagaatgtaatagaatgtaatggactccagtggaaagttgtcgaatggaatggactcatatggaatggagtggaatggactagaatggaatggaattgaatggacgcgattggaatggaagatattctaatgaagtggactcgaatggaatggaattgagtgatctcgattggaatggaatagattctaagaaatggactagaatgg

SEQ ID NO: 5097 - DNA, 160 bp, Protomyxzoa rheumatica
ctcagaacccagcagtagtgttctggaaccctatctgatggagaaatattgagaccggaagaggagtgttgtggaatcctatgtgaggtacaaacattcaggaactcatagcattgttctggaatcctatgtgattgagaaacactcagaacccagtagc

SEQ ID NO: 5098 - DNA, 129 bp, Protomyxzoa rheumatica
attccattgcattcaatccgagtccattccgttgcattccattccattccttttgagaaaattcaattccattctattccattgtagtcaattcaattccattacgtttgagtccaatccactgcattc

SEQ ID NO: 5099 - DNA, 145 bp, Protomyxzoa rheumatica
ctgagaatcattctgtctactttttctatgaagatattgctttttctaacataggcctcaaagccctctaattatccacttgaaaatctacaaaagagtatttcaaaactgctctaacgaaagaaaggttcaactatgtgagttg

SEQ ID NO: 5100 - DNA, 247 bp, Protomyxzoa rheumatica
atggcatggtggcagctgaccttcgcctttacatggattgaaatgttcactcaacatggactgctaagattatttttttccttaaacatttgaatccattcaatgccattccattccatacgagtccattccattccaatcaatgttattccatttgagtccattccattccattcgattcaagtccattccattcaatcccattaaattctattccattccattcttttccattccattccattcc

SEQ ID NO: 5101 - DNA, 124 bp, Protomyxzoa rheumatica
tctgcactgatcacccacgtgatgtaacgcttgactaggctctgcctatggggtataataacatatcactgcattgatcaccaaagtgatgtaactcctgtccaagctctgcctataggggtcc

SEQ ID NO: 5102 - DNA, 259 bp, Protomyxzoa rheumatica
gcttctgtctagtttttatgggaagacatttcctttttcaccaaaggggtcgaagcggtctaagtgtccacttacacatactacaaaaagagtgtttcaaaccttctctaagaaagggaatgttcaactctgtgacttgaaagcagatagctcaaagcactttcggagagtgcctctctagattttatatgaaggtattcccatttccaacgaaatcgttacagctatcgaaatatccacttgcagattctacaaaaag

SEQ ID NO: 5103 - DNA, 181 bp, Protomyxzoa rheumatica
ctcagaaactcccttgtgatgtgttagttcaattcacagagctgaacctatcttttgatagagcagttttgaaaatctctttttgtagaatcagcaagtgcatatttggaaacctttgcaggctatggtggaaaactaaatatcttcttataaaaacttcacagaagcattctgagaaact

SEQ ID NO: 5104 - DNA, 273 bp, Protomyxzoa rheumatica
aaataactacttgcagattctacaaaaagagtgtttccaaactgctaaatccaaagaaatgttcaaattggtgagttgaatgtacacctcacaaggaagtttctcagaatgcctctgtgtagttttcatgggaagatatttccttttccacaataggcctcaagccctccatatatccatttgcagattccacaaaaagagtgtttccaaacttctcaattgaaagagaggttcaactccatgagatgaatgcatacatcacaaaaaagtttc

SEQ ID NO: 5105 - DNA, 151 bp, Protomyxzoa rheumatica
ggcgtgagccaccgcacccggccagtctcctttagactgtggatgagtaaacggctgagagatagacattccatgtgagtgcaacaaattgaatgtagaccatgacaagtttggagaacaaagaggaaaacaccaaaaatagaaatctgat

SEQ ID NO: 5106 - DNA, 128 bp, Protomyxzoa rheumatica
cgaggtaatgtaactcttttctaggctgtgcacccagggggattgagacatatctatacactgatcacccaggtgatgcttctcttccctatgctctgcgtacaggggacattgtgacatatctctgc

SEQ ID NO: 5107 - DNA, 178 bp, Protomyxzoa rheumatica
ttgcagattctacaaaaagagagtttcaaaactgctcaatgaaaagaaagatttaactctgtgagattaacgcacacatcaaacggaagtttctcagattgtttctgtctagattttatgtgaagatatttcgttttctaccataggcagcatagcgctccaaatatccacctgcaga

SEQ ID NO: 5108 - DNA, 266 bp, Protomyxzoa rheumatica
taactccaaggagtaaaatcagtccagatggctgacttaatagtattaactggagcttaccaattggttgaaggaagggtggcaaatatatacactgatagcccatatgcttttggagtagcccatgatttctacatgctatggaaacagaagtctttctcacttcaccggggtaacctacataaacatgtactgagtcttggaactattagaaacagttcaaacgccaaagcagctcacagtggtaaaaatccctggacaccaaa

SEQ ID NO: 5109 - DNA, 140 bp, Protomyxzoa rheumatica
tccattccattccattccatttcattcgtgtcctttccattccatcccattcgagtccgttgcattccattcgattccagtccatttaactcctttccattccgttccagtccatttcactccattgctttcgatcccat

SEQ ID NO: 5110 - DNA, 221 bp, Protomyxzoa rheumatica
tagcagtgttctggaattgtatgtgagggacaaacactcacaacccagcagcagtgttctggaatcttatctgacggacaaatattcagactagggaaggagtgctctagaaccctgtgtgaggtacaatcattcagaccgcagcaggactgttctggaatcatatgtgaggggcaatcattcagaccacagctgatgtgttctggaatcctacgtgtggg

SEQ ID NO: 5111 - DNA, 336 bp, Protomyxzoa rheumatica
tggattggagtggaatggagtggagtggaatggagtggagaggagtggaatggatagagttgaatggaaaggaatggatgggcaaggaatggaatataatcgattgcagtggagtcaagtagagtggagtgaagtggattggaatggaatggagtggaatggggtggaatgttgtggagtggaatgcaatggggcagaatggaatgcaatggagggggatgtagtggaatggaaaggagtggaatggagtggaacagagttgaatgctgtggaaggaaatgacctgaagtctaaaggagtggaaagaaatggagtgaggggaatggaatggaatgg

SEQ ID NO: 5112 - DNA, 225 bp, Protomyxzoa rheumatica
caagaatttggtatttctactactgtattcttatccaacatacatgtttattcattcgttttgctgcttctctttatcttcagtgcattccatggtacctgacgcctattgggtaagtacccagtactttacaggataagtttaaagatctatgacaaggaggttgagaatctaagatttatagaagtgcaatggcaaccatactttttttttcaaatgctgctg

SEQ ID NO: 5113 - DNA, 122 bp, Protomyxzoa rheumatica
acaagcacaatatttgttgaataaataatttcaaaacagaatcctgatttttagaatgacttcaacttctatccactgaaatatcatattttctcaaaaagcacattcaatagggcaaaaaa

SEQ ID NO: 5114 - DNA, 238 bp, Protomyxzoa rheumatica
gaaactgcattctgatgtgcagactcatctcacagatttaaatctttcttttgattcagaagttgtaaacactctttttggaaaatctgagaagggacatttgggagcacattgaggcccaaagggatacacgaaatatccccagaaaaaaactagaaagaagccatctgtgaaactgcttttgacgtgtggatttatttggcagcgataaacttttattttgattcagcagtttgga

SEQ ID NO: 5115 - DNA, 147 bp, Protomyxzoa rheumatica
aatctgtgaggggacatttttgagcccattgaggcctatggggaaaaactgaatatcctgagggaaaaaactagaaagaagctatctgtgaaactatctgtgaaactagaaaggagttatttgtgaaacatctgtgatgtgtggatt

SEQ ID NO: 5116 - DNA, 334 bp, Protomyxzoa rheumatica
gagatgaatagacacatcacaaagcagtttcaccgataggttcttagtattttttatctggtgatattcagtttttccccataggcctcaaaggactcctaaatgtcccttcacagattctacaaaaagagtttttttcaaactactgattcaaaagaaagttttttcttggtgcaaagaatccacagatcacaaagtagtttcatagatagcttctttctagtttttatttgaggtattctgttttcccagtaggactcaatgggctcctaaatgtcccctcacagattcttcaaagaacatttgcaattttgtgaatcataagaaagtttta

SEQ ID NO: 5117 - DNA, 356 bp, Protomyxzoa rheumatica
gaaaggaatgcaatggattgttgaaatgaaatatgagctaagattataccactgcactccagtctgagtgacagagtaagatccagtcgaaataaacaactggaatggaatggagtaaaatcgaaagaaatggagtatactggaacagaatggagtggaattgagtggagtggagtggattggagtggagtggaatggagtaaagtggaatggagtggaatagagtggaatggaatggaatgaaaacaagtagaatggaatggaatggaatggagtggaacggagtttagtggacttgaatgcagtggagtggaatgaagtggagtggaatggagttgaattgagtggaatagaat

SEQ ID NO: 5118 - DNA, 1027 bp, Protomyxzoa rheumatica
tggaggatgtcagagggaagtttgggaaaagtagaggaatgtacggcccactcagcctgagtcaccttcgctactgacctcatcttgtctcgactgagtgctcctttcaggaagctggtgtctggaaaacttctcaattttagtatcaattattattcagaggctgaaaggcaagcctccacctaaagtgccagtcttggggccttggtgagaccctctgctggggagaaactccacttcactggggggttcttattttatacaaaatggggacatgacggggcagccaagcagcagaaaaccaaatcataagcaagaaccaaactcttggggagtttgattctttctgctacatagtgcacaagttctggagagactataggggtgaagaataataaaagattttatttttgaaacatcttgcatagttgccctggttggagtgcagcagcacgatcatagctccctgtagcctagaactcctggctcaagtgatcctctgcctcaatatccagcatagctgagacaacagtttggaactatcacacctggctaaatgtttttaatgcttcaagttttttgtataaatggggtctcactatgttgacaaggctggtatcaaattcctggcctcaagcaattctatctcctcagccaatcaatatgccaggaatacaggcatgagacaccgtgcctggccagcgcctttataatgttttattctcccaagttcttctcaaaaaagtcaacatccaccaagtatcagctgagatttgaacttcaaccctgggctgaactcagtggcaggactctccattcccaacaagggacaaatggagaaataaatggtgagagggaggagcttgattctgcccatgctaattggacacctattgtgtgctaggaagacacacagaggtcaatccaaattccagctccagccagagcaggacagccatggtgtagaaggccaagcccagaggagggagccttagcaagcggagcacccctccatggagtattgaca

SEQ ID NO: 5119 - DNA, 134 bp, Protomyxzoa rheumatica
ctaagctctgcctacaggggcattctgacatatctctccagggctcacccaggtgatgtaacaattctctgggctttgcctacagggggctctgtgatatatatttccactgatcaaacaggtgatgtaagcct

SEQ ID NO: 5120 - DNA, 167 bp, Protomyxzoa rheumatica
cccttgctgttctcatgttagtaaattctcatgagatctggttgttaaaggtgtacagcacctcccctttcaccactcacttctgctccagatacatagaacgtgcctgcttccccttcatcttacaccataactgtaagtttcctgaggcctccccaaccatgctt

SEQ ID NO: 5121 - DNA, 132 bp, Protomyxzoa rheumatica
agtttctgtgattaatagcttttaatggattgcttgagttttaaaaaaaattttaagtagatacatcatctgagaatttaaaactctgtcttttccattgagatatatgtttatcttattggttttgcagtt

SEQ ID NO: 5122 - DNA, 147 bp, Protomyxzoa rheumatica
aaccggattggaatggaatggaatggagtggaatggaatgaatgcaatgaaatggaaaggaatactatgaaatcaacccgagtgttatggaaatgaatgaaatggaatggaatggaaaggaaccaagccaagtgcaatggaatagaa

SEQ ID NO: 5123 - DNA, 128 bp, Protomyxzoa rheumatica
gagcagtttggaaacaatcatttgtggaatctgcaagtggacatttggagcgttttgcatcctgtggttgaaaaggaattatcttcacataaattttagacagaagcaatctgagaaacttctttgtg

SEQ ID NO: 5124 - DNA, 280 bp, Protomyxzoa rheumatica
tctcagaatgattctgtgtagtttttatgtgaagatatttgcttttcctacgtaggatgcaaaaggctccaaatatccacttgcagatcctacaaaaagagagtttcaaaactactttatcaaaggataggctcaactctgtgaggtgaatgcacacatcacaaagaaatttctcagaatatttctgtgtagtttttatgtgaagatatttcctttcccacataggctccaaatcgatcaaaataactacttgcagattctacaaaaagagtgtttccaa

SEQ ID NO: 5125 - DNA, 274 bp, Protomyxzoa rheumatica
ccgccttggcctcccaaagtgctgcgattacagacgtgagccactgcgcctggccttgacttctcaattgatttcacatccatcacgggtcaacaaaggggctctggtggtcgtagtcattcagagactcaaacagatagacccttattccagaagatgctcccacagttccagaaacagagcaaagaaaacacaatcagccatgagccacttcttaaatcccctgcctggaagggatacacatttcttctgtcacagctgttgcccaaaatgt

SEQ ID NO: 5126 - DNA, 152 bp, Protomyxzoa rheumatica
gactggaattggatggacccaaatgtaatggacttgaatgtaatagactcaaatagaatggattaaaaaggaatggtcttgaatggaatttattcgaatacagtggaatcgaatggaatgcaatagtatggaatggaatcgaaaggaatgga

SEQ ID NO: 5127 - DNA, 124 bp, Protomyxzoa rheumatica
gaaagagagcaaaaggggctgaacttgcttttaatacaagcccactccaaagataactaacctactcctgagatagtgacattaatccgtgcatgggggcagaatctcataatccaatcactct

SEQ ID NO: 5128 - DNA, 318 bp, Protomyxzoa rheumatica
tccattccattcctctccattccactccactccattccattatgctccattccacttcattccattccactccattccattccattcctctctattccatttctttccgttctgctcaattccactttactccattccagtacactccattccacttcgttccactgcattccattccactccactccattccattccactctactctattccattccattcctttatttctattggatgtcactctgtcacccagactgtagtgcagtggcacaatcttagctcacattacatttcaccattccattgcattccatt

SEQ ID NO: 5129 - DNA, 143 bp, Protomyxzoa rheumatica
gaatcaccaatgaatgaaatggaatggagtcatcatcaaatggaatcaaatggaattatcgaatggacttgaatagaatcatcatcgactggaatcgtgtggaatcatctaatggtgaagaacagaatcatcatcaaatggaa

SEQ ID NO: 5130 - DNA, 128 bp, Protomyxzoa rheumatica
agagataaacttttctttcattcagcagtttggaaaccctgattttgtataatctgtgaaggtatatttgggagtgcctagggtagtatggtaaaaaaggaaacatcctcagatataatctagaaaga

SEQ ID NO: 5131 - DNA, 125 bp, Protomyxzoa rheumatica
ctttgtgatgtttgcattcatctcacagagttcaaactttcttttgactgagctgtgtggaaacagtctttcttaggaatctgcaatgggatatttgtgaactctttgaggcctatggtgaaaaa

SEQ ID NO: 5132 - DNA, 262 bp, Protomyxzoa rheumatica
acctagtttatcagtgcagagatatttcacaataacctctctaggcagttcctagtcaagagttgaatcacctgggtgatcagtgcagaggtatttcacaatgccccgttggacagagggtagacaagagttacataacctaggtgatcagtgcagagatttgtcaaatttccctgtaggcagtgattataaaagtgttaaatcacctaagtgattactgcggagatatgtcacaaggctcctttaggccgaacttagatgt

SEQ ID NO: 5133 - DNA, 212 bp, Protomyxzoa rheumatica
cgaatggaatacaatggaatttaagtgaatagactatattggaatggaatggaatggtctcgaatggaatagaacgggatagactcgaatgtaatagaatgcaatggaatggcctcgaatggaatggaatggaatatactggaatggaattaaattgactctaatgcaatgcagttgaattgaatggtcacgaaagcaacggaatagaatgc

SEQ ID NO: 5134 - DNA, 124 bp, Protomyxzoa rheumatica
ggaattgtgagagatctcgccactgatcccccaagtgacataactattatctaggctttgcctacggggagctttgtgacataccattgcaatcatcacccaggtgatgtaactcatctaattt

SEQ ID NO: 5135 - DNA, 131 bp, Protomyxzoa rheumatica
acacagagttgaacctttattttgatagagctgtttggaaacattctttttgtagaatctgcatgttgatatctggagtgctttgaggcctactgtggaaacggaaattacttcccataaaaacttaacta

SEQ ID NO: 5136 - DNA, 140 bp, Protomyxzoa rheumatica
atactgacataaaaacagacacatagaccaatggaacagaataggtagcccagaaataaacccacatatttacagccagctcattttcaacaaggatgctaagaacatgcagtggggaaaggacagtcttcaataaatag

SEQ ID NO: 5137 - DNA, 236 bp, Protomyxzoa rheumatica
aaaaaggaaatatcttcaaataaaaactgcgcagaagcattctgagaaaattcttagtgatgtgtgcattcttctcacagagttgaacctatcttatcattgagaacttttcaaacactctttttgtacaatctgctaaaggatatatgcagcgctttgaagcctgttatggaaaaggaaatatcttcacgtaataactacacagaaacattctgagaagtttttttgggatgtgt

SEQ ID NO: 5138 - DNA, 136 bp, Protomyxzoa rheumatica
gtatgttcaactctgtgagatgaaagaaaacatcacaaagaattttctgactgcttctgactggtttttttgtgaacatatttccttttccaccgtaggcctcaaaattctgaaaatgtccactggcagattctac

SEQ ID NO: 5139 - DNA, 206 bp, Protomyxzoa rheumatica
cattcatctcaaagagttgaacctctctcttcattgaggagtttggagacttttttttgtgcaatctgcaaaggaatatttctgagtggtttgaggcctatggtgaaaaagaaataacttcacataaaaactagacacaagcattctgagaaacttcttttttatctgtgcattcacctcacagagttgaacctttcttttcattg

SEQ ID NO: 5140 - DNA, 140 bp, Protomyxzoa rheumatica
tggtctgaatgtttgtccctcacttaggattccagaacactccttctgtggtctgaaagtttctccctcacaaaggattacagaacactgctcctggtttctgagtgtttgtcttttacataggattccagaacactgct

SEQ ID NO: 5141 - DNA, 418 bp, Protomyxzoa rheumatica
tccttttggattcattccgtttcattccattccattcaagtacattccttttcattccattcaagtccgttccattccatttcattccagtcgagtcgtttcatttccattccattccattcgagtccatgccactccaatcgagtccgttccgttccattcaagtccattccattcgattccattccattccattcattttgagttcattcgattcctttccactccactcgagtccataccattctaatccgttcgggtccattaaattccattccattagcgtccattgcaataaattccattccactctattagaggccattctacgcaattagaatccattccattacatgcccttcgagtcaattccattccttaccataatattccattcaagtccattccattccattcc

SEQ ID NO: 5142 - DNA, 188 bp, Protomyxzoa rheumatica
atatattatatactgtacataaattatcaaagtacccaagttatatattatatactgtaacaaaaaatcaacgtacccaaattatatattatgtactgtacataacgtatcaaagtaaccaaactatatattatatactgcacatagcatatcaaactacccaaactatatattatatactgtacata

SEQ ID NO: 5143 - DNA, 159 bp, Protomyxzoa rheumatica
ttcctatttcaccgtagccctcggtactctctgaaataagcctttgcagattctataaaaacattgatttctaactgctgagtgaaaagaaagatttaactctgtgaaatgcatgctaacatcacaaagcagtttctcagatagctgccttctatctgt

SEQ ID NO: 5144 - DNA, 207 bp, Protomyxzoa rheumatica
agtccattagatgattccatttgattaaattcaatgatatttccattcgagttcattcgatgattgcactcgtttccatacgatgaagattccatttgattccatttgatgattccattcttttgcatttgatgattattccattcggttacatttgatgattcctttctattccatctgatgatgattccattcgtttacattaga

SEQ ID NO: 5145 - DNA, 123 bp, Protomyxzoa rheumatica
cgttcaattctttttgattatgattctgtttgatgccattcgatgattccatgccattccatttgatgatgtttcctttcgattccatgccatgattcctttcgattccatttgatgatgatt

SEQ ID NO: 5146 - DNA, 157 bp, Protomyxzoa rheumatica
tccattcgaatccattcgatgattccactcgattccatttgatgactcccttcattctcatttgatgattcccttcaattccctttgatgatcattccattcgattccatttggtgattccatttgatcatgactccattcgattccattcaatgat

SEQ ID NO: 5147 - DNA, 171 bp, Protomyxzoa rheumatica
atacagattgtgcatggagtaaaagccttcaatccttattaataatgatggtagctgcgctgcagaaaagaaagcctgtcagagtaacatgttcagctttacatcataatcagaggtatgttgatctctgttgaaggcagaattaaaaacgccttcaacatttttagataa

SEQ ID NO: 5148 - DNA, 389 bp, Protomyxzoa rheumatica
acttttagaaattaatttggcttttaaggggcctggatagtaaagtattttattggcatttgaatgaaccaagaaaatgcatataaatacacatgcgtaactataagggcaaaagtagtactttcgaaatcacaacattagattaaaccatataattttttattgtttttaaaaaatcgagtctttctcatcttacgataaattatttaccagagtaaataagcttcttactgaggtcaaaagactttctggaaaaacttctccttgatgaaattacacttaaaacatcacttccatcgtgaagtatttaagatgttcctggtccttttcctgttatgtggaatcgtcaattcaaattttaaaagtgactttgagatgtttttcatcta

SEQ ID NO: 5149 - DNA, 192 bp, Protomyxzoa rheumatica
acattgtgttcgagtccctcccatttgattctattgtattgcattccattccattggattcctttccattctatttcattcgtctccattccatttctatccattagtgtcttttcctttaaattccgttgcattccatttgagttagttctattacattccgttacattcgtgtccattccattccacacg

SEQ ID NO: 5150 - DNA, 134 bp, Protomyxzoa rheumatica
ttttcacaaaaaaactagacagaaacattgtcagaaactactttttcatatgtccattcaacacacggtgttgaacattcctctagaaagagcacttttgaaataatctttttctagaatctgcaagtgtatat

SEQ ID NO: 5151 - DNA, 123 bp, Protomyxzoa rheumatica
tttccacttcgagatcctacaaaaagactgtttcataacagttcaatcaaaaagaaggttcaattctgtgacttcaatgcacacattacaaagcagtttctgagaatgattctgtctaggttt

SEQ ID NO: 5152 - DNA, 247 bp, Protomyxzoa rheumatica
acggaatcatcatagactggaatcgaatggaatcatcagatggactcgaatggaatcatcaaatggactcaaagggaagtgccaaattgactcgaaccaaatcatcatcaaatggaatcgaatggaataattgaaaggacgcgaatcaaatcaacaaatggactcgaacggaataatcatagaatggaaccaaatagaatcaccatttggacttgaatggaatcatcattgaatggaaccgattgga

SEQ ID NO: 5153 - DNA, 219 bp, Protomyxzoa rheumatica
atatccacttgcagattctacaaaaagtgtgtttcaaaactgctctatcaaaagaaattttcaactctgtgagttgtattcaaacatcacaatgcagtttctgagaatacctgtgtctagtttttatatgaagatatttcgttttctaccataggactcaaatcgctccaaatatccaattgcagattctacaaaaagagtatttcaaaacagctccat

SEQ ID NO: 5154 - DNA, 216 bp, Protomyxzoa rheumatica
accttgtgatccccttgccttggcctccaaatttgctgggattccaggcctgagtcaagatccatattttttaaatgaaaaaaaatttcaaagttattctgcttggtacaataatcaaatatataaactgagggttaaaacataaccttggaacatatttataagtgcatatggataatacagaggataattttttaaataacatattttgaaagc

SEQ ID NO: 5155 - DNA, 135 bp, Protomyxzoa rheumatica
cgcatcacaaataagtttctcagaaagcttctttttagtgtttttgtgaagatatttcctttttctccataggcctaaaagcgctgcaaatatccatttgtggattctacaaaaaggctgtttccaaactgctca

SEQ ID NO: 5156 - DNA, 132 bp, Protomyxzoa rheumatica
gtttgcattcaactcacagagttgaatattcctctggatagagcagttttgaaacacattttgtagattctgcaagtgggtatttggacctctttgaagacttctgtggttacgggaatttcttcacataaa

SEQ ID NO: 5157 - DNA, 156 bp, Protomyxzoa rheumatica
gattccagaagaatcttgctgtagtctgaatgtttctccctcacataggattccaaaacttttctgctgtggtctcagtgtttgtccctcaagtaggattccagagcactgttactggtttctgagtgtttatcaatcacataggattccagaaca

SEQ ID NO: 5158 - DNA, 241 bp, Protomyxzoa rheumatica
tctttgtgatgtttgcattcaactcatagatttgaacatgccctttcatagagcaggtttaaaacactctttttgtagtatctggaaggggagattttgagcgctttgacgcctatggtgaaaaaggaaatatcttcccataaaaatagatagaagctctctcagaaacttatttatactgtgtttcctcaactaacagagtttaactttgtttcgatatagcagttttgaaaaactcttc

SEQ ID NO: 5159 - DNA, 127 bp, Protomyxzoa rheumatica
agaaatatgccacaatgccaccagtaggcagatatagacaggagttacatcactgcgtgatcaatgcagagatatgtcacaattctcctgtaggcagagcctagacaagagtcccaacacctgggtg

SEQ ID NO: 5160 - DNA, 235 bp, Protomyxzoa rheumatica
cttttatatatctacttatcattgaaatgatgtatgttttatatacctaagcatcactgaaaggatgcatcttttatatacctactcatcatcgaaaggatgcatctcttatatacctatgcatcatagaaaggatgcatcttttatatccctaagcatcattgaaagaatgcatcttgcaacccaacattttctgcccacgattatatagggggaaaaatgtacatattgtata

SEQ ID NO: 5161 - DNA, 128 bp, Protomyxzoa rheumatica
ctcataaataagacacagaatccttttctttctttctttctttttttttttttgagaaggagttatcacccaggctggagtacagtgccacaatcttggctcactgcaacccccgcctcccgaattca

SEQ ID NO: 5162 - DNA, 257 bp, Protomyxzoa rheumatica
ttttgattcagcagtttggtaatgctgttgttttagaatctccaaaggaacatatgggagctcattgaggccaatggtgaaaaagcaaatatcccagtataaaatctagaaggaagttatctgagaaactgccttgggatgtgtgcattcttttggcagatttaaatccttattttgattcagcagtttggaaaaactgcttttgtcctttctgtgcatggacatttgggacctcattcaggccaatggcaaaaaag

SEQ ID NO: 5163 - DNA, 265 bp, Protomyxzoa rheumatica
acacatttttgtgattcagcaggttggaaacatcagttctgtaaaacggtgaagggaaattttggactccatcgaggtttatgtttaaaattgaatatccccagataaaatctagaatgaagttatcagtgaaactgctttgtgatgtgtggattcatctcacagagttaaaactttatttgattcagcaggttggaaacacactttttgatgaatctgcaaaggtacattttagagcagattgaggcctatgcagtacaactga

SEQ ID NO: 5164 - DNA, 128 bp, Protomyxzoa rheumatica
aaaacgactgtttccgaactgctcaatgaaaagaaagtttcaactctgtgatgtgaaagcacacataaaacagaagtttctcagattccttctgtatagtttttatgtgaagatattactttttcacc

SEQ ID NO: 5165 - DNA, 315 bp, Protomyxzoa rheumatica
cactgcataccattccattcctttccactccattccgttccattcctcacatttgacaggatgtcactctgtcacccagtctgcactgcagtgacggaatctccgcttacatttcatttcactattccattccattccattcctctccactccactccactccattccgttccattacattccactcctttccactccagtccattctattccactcgactccactccattccattccatccctttccattacactgcagtccactccacaccactccactcactgcactccattccattccactccatcccatt

SEQ ID NO: 5166 - DNA, 156 bp, Protomyxzoa rheumatica
tcagattaaagcaggagtgttctggaatcctaattcagggacacacagttcagaccacagcaagagtgccctggaatcccatgtgtgggagaataattcagacggttgctgcagtgttcttgaatcctatgagagggaaaaacattcagaccctcg

SEQ ID NO: 5167 - DNA, 177 bp, Protomyxzoa rheumatica
ctctgtgagttgaagacgcacatcacaaagcagtttttgagaatccttcggtctagtttttatgtgaagatattcccgtttccaatgaaggcctaaaattagtccaaatatccaattgtagatgctacgaaaagagtatttcaaaactgctttgtgaaaaggtatgttcaactccgt

SEQ ID NO: 5168 - DNA, 180 bp, Protomyxzoa rheumatica
gagcgctttgaggcctatgttggataacgaaatatcttcacgtaaaaaccagatagacgcattctgacatacatctttgtgatgtgtgcattaatctctcagagttgaaacttaattttcattcagaagttttgaaatactctttttgtactatctgcaagtggacatttggagcgcttt

SEQ ID NO: 5169 - DNA, 156 bp, Protomyxzoa rheumatica
ctgtggtctgaatgtttgtccctcacataggattccagaaaactgctacaagagtcagaatgcttgtccttcatataggattcgagcacattcctgctgtggtctgaagatttgtctctcacatggcatccaagaacactgctcctggggtctgaa

SEQ ID NO: 5170 - DNA, 242 bp, Protomyxzoa rheumatica
caattggatatttggagcgctttgatgcatattgtggaaaaggaaatatcttcacataaaaactacaaaaaagacttctgagaatcttctttctgatgtgtgcatacgactcacagggttgaacctatcttattattgatcagttttgaatctctctttttatagaatctgcaagcggatatttggagccctttgcagcctaaggtggaaaaggaaatatcttcaatgaaaactacacagaa

SEQ ID NO: 5171 - DNA, 154 bp, Protomyxzoa rheumatica
ttcatctctgtgagatgaatgcacacatcaccatgaagttcctcagaatgattctgtgtagtttttagttgaagatattcccatttccaccatacgctgctaatgcctccaaatatccacttgcagattctacagaaagagagtttcaaaactg

SEQ ID NO: 5172 - DNA, 129 bp, Protomyxzoa rheumatica
aaaaagaaaatattttcagataaaaactagaaagaggatttctgagaaactgctttgtgaagtaagcattcatctcactgagataaacctttttttaattcagcagtttgaaaacactgcttttgtcca

SEQ ID NO: 5173 - DNA, 149 bp, Protomyxzoa rheumatica
tacggtgaaaaaggaaacatcttctgttaaaaactagaaagaaacttactgagaaactgctttgtgatgtgtgcattaatctcacacagttaaatatttctttagattcagcagtttggaaatattggtctcgtccattttgtgaatgg

SEQ ID NO: 5174 - DNA, 136 bp, Protomyxzoa rheumatica
aatgcttctgtctagtttttatttgaagatatctcctttccaacgaaatcctccaacagctccaaatatccaaaggagatcgttcaaaagtagtgtttcagtactgctctatcaaaagaaatatgttcaactctgt

SEQ ID NO: 5175 - DNA, 165 bp, Protomyxzoa rheumatica
ttgaatgcaatacatttgaatggaatggactcaaatggaatatcatggaatggaatggactcgtatgcaatggaatggaatcgaaactaatggaaaggaatggattcgaatggaaagcaacggaatggactacaaaggaatggaaaggaattgaatggaatggac

SEQ ID NO: 5176 - DNA, 129 bp, Protomyxzoa rheumatica
attctacaaaaagagagtttcaaaactgctctatcaaaagaagcatttcagtctgtgagatgaatgtatacattacaaagaagttttccagattgcttctacctagattttatgtgaacatatttcctt

SEQ ID NO: 5177 - DNA, 327 bp, Protomyxzoa rheumatica
tattggcttacaatgtaattgattcgaatggaatggaactgaatggaatgtaatcaaacggattggatgggaatgcaatgcaatagaatagaatggaatgcagtggaatggaatggaatggaatggaatcgagtgaaatggaatcgaacagaatggaatcgaatggaatggaatctattggaatgtactggaatataatggactcaaatggattggactgtaacaaaatggaatagaacagattggaatcgaatggaacagaatggaattgaatggaatggactcgaatagaatggagtcgagtggaatggatttgaatggaatgga

SEQ ID NO: 5178 - DNA, 164 bp, Protomyxzoa rheumatica
caagcaatttcgtacttatctctgccacatactgtaaggcgtcagaatttgacataaaatttataaaattggccaggcacactggcttatgcctgtaattccaacactttcggaggccgaggtggttggatcacgaagtcagttcgagaccagcctggccaata

SEQ ID NO: 5179 - DNA, 193 bp, Protomyxzoa rheumatica
gtgagatgaatgcacacattgcaaagtagtttctcagaattgttctgcgtagtttttatgggaagatatctccttttacacaataggtttaaaagtactccaaatatccatttgctgatcctttaaaaagactgtttcataactgcttaatcaaaagaaaggttcaactctgtgagatgaatgcacaaatcac

SEQ ID NO: 5180 - DNA, 137 bp, Protomyxzoa rheumatica
aataatcccattaaaagtgtacaaaggacatgacagacattcttcaaaagaagatagacaaatggccaacaggcatatgaaaaatttgattattaaacattgtattcacatatcaaaacatcacactataccccatt

SEQ ID NO: 5181 - DNA, 245 bp, Protomyxzoa rheumatica
actcctgctctggtctgaatgtttgtccctcaaatgggattccagaacactgagtttgggatctgagtgtttgtccctcacgtatgactccagaacactgcctcatggttgtaaatgtttgtccatcacatagaattccagaacactgctatgagggattgaaagtttgtcccgcacataggactccagaacattcctgctctgctctgaatgtttgtccctcacataggattccagaacactgc

SEQ ID NO: 5182 - DNA, 150 bp, Protomyxzoa rheumatica
aatgtattggagtggagtggagtggaaaggaatgaaacggaacggaacagaatataatggaatggaatggaacggaatgtgtgctgagtatgtgcaactgcactacaacctgtgtgatggagaccctgtcgaaagaaagtagtggaatgg

SEQ ID NO: 5183 - DNA, 222 bp, Protomyxzoa rheumatica
tgctgattctttcaattccattctatgattcctttcgatgattccatttattacattggacgataatttcattagaatccactagatgattccatttgattccattatatgatgatagcattagtttccattcgatgattccatttgattccattcgatgactacatttgattccgtttgataatgattccattcgagtccattcgatatttccattcgagc

SEQ ID NO: 5184 - DNA, 251 bp, Protomyxzoa rheumatica
tccattcgatgattccattagattccattcgatgattatttcattcgtgtccgttagatgattccatttgattccattcgatgatgattccattttgtgccattcaattattccatttgatatcattcaatgatgattccactgatttcttttgatggttcctttccatcccattcgatgagtattccatatgagtctattcgatgattccatccgattccattcgatgattactccattcgtgtccattc

SEQ ID NO: 5185 - DNA, 182 bp, Protomyxzoa rheumatica
gaacacaatggaatgaaatggtctctaatggaatggactcaaatggaatagaatggaatggaatagcaccaaaaggaatggaatggaagggagtgtaatggaaagacatcaaatggaatggaatggacttcaatggaacggactgtattggaatttactcgaatggaatggactggagtgga

SEQ ID NO: 5186 - DNA, 123 bp, Protomyxzoa rheumatica
tttgattccatttgatgattcctttgtattccattcgacgatgattccattcgagtccattcgatgaatccatttgagtccattcaattatgattccatttgatttcattcgatgattctatt

SEQ ID NO: 5187 - DNA, 148 bp, Protomyxzoa rheumatica
gttccttattcctgctacaactctgagctatagggtagttcttattagctgtatgcagatcgctactgttcgtagtcggccttacactttgcttggagcacacagtccactctaagagatctgtgactccttacttcgcggctgatga

SEQ ID NO: 5188 - DNA, 169 bp, Protomyxzoa rheumatica
cagcaggctggaaacactctttttggagtatctgtgaagggacattttgtaatgtattgtggcctatgagtaaaacagaataaccccatataaaaaccagacaaaagctatctgtgaaactcctttatgatgtggattcacctcacagagttaaatttttcctttgcat

SEQ ID NO: 5189 - DNA, 216 bp, Protomyxzoa rheumatica
aatggaatcatcatcgaatggaatctaatggaatcatcatgtaacagaatcgaatggaatgatcaacgaatggaatcaaatggagaaatcgaatggaatccgttggaatcatcatcagatggaattgaatgcagtcatcatcgaatggaattgaaaggaatcataattgtaaggaattgaattaaatcatagtcgcatggaatcaaaaggaatcat

SEQ ID NO: 5190 - DNA, 167 bp, Protomyxzoa rheumatica
gaatggaatggaatggaatggaatgaaatggaatggaatgcaactatgaaataaaatgtgagctaagattgtgccactgcactccagtctcggtgacagagttagatccagtcgaaataaaggaatggaatggaatggagtagaatggaatggaatggagtggagtg

SEQ ID NO: 5191 - DNA, 199 bp, Protomyxzoa rheumatica
caattccattgcattcattcagttcctttcctttctttcgacaggatctcactctctctcccaggttggagttcagtggcacaatcacagctcacatttcgtttcaccattccattccactgcattccaatccgttccattccactccattccactatatcctttccactccattccattccattccattccattccat

SEQ ID NO: 5192 - DNA, 221 bp, Protomyxzoa rheumatica
aattattctccgtcacataggattccagaacactcctactgtcctctgaatatttgtccgtcacttaagattccagaacactgctgttgggttctgagtttttgtccctcacatacgattcccgaacactgctacgtgggtctaacagtttgtcactcacataggattccagaacattcatgctgtggtctgaatgtttgtctctcacttaggattccaga

SEQ ID NO: 5193 - DNA, 193 bp, Protomyxzoa rheumatica
acaatcactcataacccagcagcagtgttctggaatcctatgtgagggacaaacactcagactttcgcaggagtgttgtggaatcatttgtgagggacaaacattcagaacacagcagcagtgttctggaatcctagtggagggacaaacatacagaccacagcaggagtgttctggaatcctatgtgaggga

SEQ ID NO: 5194 - DNA, 128 bp, Protomyxzoa rheumatica
caaacatattcaaatggccaacaggtgtgtagaaagatgctaaacattaccattcatcagaaaattgcaaatcaaaatcatgagacagcactttataacagttagaatagctaatatcaaaaagaaga

SEQ ID NO: 5195 - DNA, 149 bp, Protomyxzoa rheumatica
gataatgaatccattcaactccattcgatgattccatttgagcaaattcgataattccatctgagtccaatcgattattccaatcgagtccattcgatgattccaatcgagtccattcgaaaatttcatttgagtccatttgatgaatg

SEQ ID NO: 5196 - DNA, 177 bp, Protomyxzoa rheumatica
attgatctgaacaaggctttttttgaataagaactcaaaagcacaggcaacaaaagcaaaagtaaataaatataattacatcatactaaaaagcttctatacagcaaagaaaacaatcaatagagtgaagagacaatctacagaatgggaaaaaatatttgcaagctatgcgtctga

SEQ ID NO: 5197 - DNA, 153 bp, Protomyxzoa rheumatica
tgtctagtttttatgtgaagatattccttttttcaccataggcttcaaagagcttcaaaagtccactcgcagattctacaaaaagggtgcttaaagctgctcaatcaaaggaaagtttcaactctgtgagatgaatgcacacgtcaaaaagaa

SEQ ID NO: 5198 - DNA, 126 bp, Protomyxzoa rheumatica
ttccgatcttatcactgcattgatcaccgaggtgatgtaattcttctccagtctctgcccatagggggccttgtgacatatttctacactgatcacctaggtgatgtaacacttgcttacgctctg

SEQ ID NO: 5199 - DNA, 139 bp, Protomyxzoa rheumatica
ctgctaggagggtttgaatgtttctccctcacctaggactacagaacattcctgcagtgttctgaatgtattttcctcatataagattaaagaacaatgctatgaaggtatgaatgtttgtcccacacgaaggattcca

SEQ ID NO: 5200 - DNA, 325 bp, Protomyxzoa rheumatica
tgtagtttttatgtgaagatatttccttttccacaataggccacaaagctctccaaatatcaatatgtagattctccaaaaagagagattccaaactgctcaatcaaaagatagcttcaactctgtgatttgaatgcacacctcatgaagaagtttctcagaatgcctctgtgtagtctttatgtgaagatatatgcttttccacagtacccctcaaagcgctccaaatatccatttgcagattctgcaaaaagagagatttgaaagtgctcagttcaaagataggtgcaactctgtgagttgaatgcacagataacaacgacat

SEQ ID NO: 5201 - DNA, 165 bp, Protomyxzoa rheumatica
ttgaagatatttccttttccacaacagggcacaaagggctctaaatatccaattgcagattctgcaaaaaaagaaattcaaaatggctcaatgaaaagatatgttcggctattgagttaaatgcgcacctcacaaagaagtttctcagaatgcttctgtgtagtt

SEQ ID NO: 5202 - DNA, 161 bp, Protomyxzoa rheumatica
acctcacacagtactcgcagcttcacttcttcaatcaccaccaccgtgaccacctcacacagtcctccaggcttcactttttcgatccccaccaccgagaccacctcacacagtccacccagcttcacttcttcaatctctatcaccgaaaccccctcaca

SEQ ID NO: 5203 - DNA, 145 bp, Protomyxzoa rheumatica
cgatcgcagaagtggatcttggaggactgtgcgaggtggactcggtggtggtgatcgaagaagtggagctgggattactgtgtgaggcggtctcggtggcagtgatcaaagaagtgaagctgggaggactgtgtgaggtggtctc

SEQ ID NO: 5204 - DNA, 143 bp, Protomyxzoa rheumatica
ttccaacgaaggcctcaaagtggtacaaatatcaacttccaaattccaccaaaacagtgtttcaaaactgctctatgaaaaggaacgttcaactctgtgaaatgaatgcaagcatcacaaataagtctctgagaatgcttctc

SEQ ID NO: 5205 - DNA, 301 bp, Protomyxzoa rheumatica
ggaatcctatgtgagagacaaacattcagacaatcgtagcagtgttctggaatccaatgttagtgacaaagtttcagaccccagcagcagtgttctggaatcctatttgagggacaaccattcagacactttcagcagtgttccagaatcctgtgtcagggacaaacattttgaccactgcaggactcttctggaatcccttgtggggaacaaacattcagaccctcgtaggtgtgttctgtaatcctatgtgactgacacacatttagaccacagcagcagtgttctggaatcccatgtg

SEQ ID NO: 5206 - DNA, 464 bp, Protomyxzoa rheumatica
gtttaatagaaggcatcactattacttaattctgcctgaagagacaagttttcttctttaggcacaggctgatatttatatagatccattagctgagtggtagtttgcctagctactgttgcctctatagctgattgagtgcttctaacaaggagggttaagaggcaagggagtattgggcaaacccttagtatggccaggactattcttattaaagtcttgaatccactgaaggaggaaaaccagcctccaaagagggaatctggagactaacttttccaagttcgaactggaacatggggtaattttctcattcttgcagttatttctataattgccgttccattgtcatcgatttccaggcagaaattagttagattgaaccttccacattctcctccttcctgggcttcctagctaatagtataaagctaatctgttgtgataaataacattcttcattt

SEQ ID NO: 5207 - DNA, 135 bp, Protomyxzoa rheumatica
tgttacgaggttctgaaagtttgtccctcacgtaggattccattacactagtgctgtggtctgaatggttgacactcacataggattccagaacattcctgctgtattctgaatggttgaccctcacataggatt

SEQ ID NO: 5208 - DNA, 147 bp, Protomyxzoa rheumatica
tgtaatttgcaacgggagatttcaagcgctttaatgtcaatggtagaaaaagaaataacttcgtgtaaaaactagagagaatcatttccagaaagtgctttgtgatgtgtgcgttaaactcacagagtttaacctttcttttcacag

SEQ ID NO: 5209 - DNA, 209 bp, Protomyxzoa rheumatica
cagctctatgagttgaatgcacacatcacaaagtagttactccgaatacttctgtgtagcatttatggaaagatatttccttttccaccataggatacaaaacgctccaaatatccacttccagattctataaaaagtgattttaaaaattgctgtatcagaagataggttcaactctctgcgttcaatgcacatatcataaagaagtt

SEQ ID NO: 5210 - DNA, 165 bp, Protomyxzoa rheumatica
gtttgttgaatgcacacatcacaacagagtttctgggaatgattctttctagtttttataagaagatatttccttttctaccattgtcctcaaagcgagtgaaatctccacttgcaaattccaagaaaagagtgtttcaaatctgctctgtctaaaggaaagttc

SEQ ID NO: 5211 - DNA, 210 bp, Protomyxzoa rheumatica
tagtctctgcctacagagggcgttgtgacatcactctgcatggatcacccgggttatgtaactctggtctaggctctacctataggggtattgtgacttatctctgcactgatcacccaggagatgtgactcttgtctaagctctgcctagagggatattggggcatatttctgcactgatcgctgaggtgatgtaaaacttgtctaggc

SEQ ID NO: 5212 - DNA, 158 bp, Protomyxzoa rheumatica
ctccattctattccatttgatgatactattcgattctattcgatgacgattcctttccattacattcaatgatgactccattcaattccattcgatgcttccatttgattccattcgatgttgattccatttttgtccattcaattattccattcgtt

SEQ ID NO: 5213 - DNA, 129 bp, Protomyxzoa rheumatica
gaatgttgtggaatggaatggaatctaatgtaagggaatggaatggaatagactggagtttaatggagtgtaaagtaaaggaatggaatggaatgcaatagaatgtagttgggtggagtggagtggagt

SEQ ID NO: 5214 - DNA, 147 bp, Protomyxzoa rheumatica
cattccatttgattccattccattcaattccagtccaatctattccaggacaatccactccactctactccactcagttcaatttaattcattcccattccattcctttccactccattacattccattccactctacccggattta

SEQ ID NO: 5215 - DNA, 122 bp, Protomyxzoa rheumatica
gcattctgaaaaactactttgtgatgtttgtcttcatctcacagagttgaacctttcatttgattaagcatttttgaaacactatttttctagtatctgcaagtggatatttggagtctttt

SEQ ID NO: 5216 - DNA, 165 bp, Protomyxzoa rheumatica
catttagacccacatagcagtgttctggaatcttacacgagggactaaatctcagaacccaacagcagtgatctggaatcctaagtaagggacaaacattcagaacacagcaggagtgttctgaaatcctatgtgagggacaaacattcagaccacagcaggagt

SEQ ID NO: 5217 - DNA, 151 bp, Protomyxzoa rheumatica
gattctttctagtttttatatgggcataatctgtttttccccatattcccccatggtctcctaaatgtcccttggcatattctacaagaagagtgtttccaacctgttgaattaaaagaaaggtttacctctgtgagataaatccaacatc

SEQ ID NO: 5218 - DNA, 285 bp, Protomyxzoa rheumatica
tgggttatttcacttaacataaggtcctccaggtttacccatgttgtcataaattgtaagtttttttttaaagctgaacagtatccgttgtgtacatgtaccgattttctttacccattcatccattgatggacacttaggttgattccatatcttggctactgtgaatagtcctgcaatgaacaggggagtgcagatatttctctgatatactgatttcctttcttttggctgtatacccagcagtgagactaatgggtcaggcagtagctctctttttacatt

SEQ ID NO: 5219 - DNA, 220 bp, Protomyxzoa rheumatica
atgtgagcattcaacacacagagttgaacctatcttttgatagatcagttttgaatctctctttttgtagaatctgcaagaggatatttggagcccttttcagcctatggtggaataggaaataccttcacataaaaactacaaaaaaggtatctgacgaacttcttggtcatgtgtgccttcatctcacagagttgaacctttcttttggttgagcagt

SEQ ID NO: 5220 - DNA, 157 bp, Protomyxzoa rheumatica
aggccatttttggtaacgggatttcttcatataaaaaagacagaagaattcaaagaaactactttgtgatttgtgcgttcaccttccagagtttaaactttctgttgatagagcagctttgaaacactctttttgtggaatttgcaagtgtatattt

SEQ ID NO: 5221 - DNA, 151 bp, Protomyxzoa rheumatica
tatatctgaagatatttcctttttcaccatagttcttaattcactccaaaatatccctttgaagattctacaaagcactgtttccaaactgctgtatgaaaagaaagctttaactctgcgagatgaatgaacacatcacaaagcagtttct

SEQ ID NO: 5222 - DNA, 128 bp, Protomyxzoa rheumatica
aactactttgtgatatttgcattcaactcacagagttgaaaattctccttgaaagagcagttttgaaatactcttttttcagaatctgcaatttggaactccttgtggtcttcctttgaaatgtgatt

SEQ ID NO: 5223 - DNA, 166 bp, Protomyxzoa rheumatica
atttgaataaattccttttgagaacattcctttcgagtccattctatttgaatccattccagtcgagtccattacatttgggtaaattccattccgttacattcaattcattgccatttcattccattctataccatttgagtcctttccattcgagtccattcca

SEQ ID NO: 5224 - DNA, 238 bp, Protomyxzoa rheumatica
tcatcaatgaatggaatccaaaggaaacatcatcaaatggaaccgaatgcaatcatcgaatgggctcgattggaataatcgaatcgactctaacggaatcattattgaatggaatcattattgaatggaatcgaatggaaacattgaatagactcgaatggaatcatcatgggatggaatcgaatggactcgaatagtatcatcatcgaatggaatcaaatggaatcatcattgaatg

SEQ ID NO: 5225 - DNA, 154 bp, Protomyxzoa rheumatica
acattcagaccctcgtagcagtgttctggagtcctatgtgagggacaaacatttagacccatgtaacactgttctggaatcaaacatcagggaaaaacactcagaacccaaaagcagtgttatggaatcctacataagggacaataattcagat

SEQ ID NO: 5226 - DNA, 188 bp, Protomyxzoa rheumatica
atcctgctgtggtctgaatatttctccctcacataggattccaaaacattcctgctgtggtctgagtgtttgttcctcacttaggtttcgagaactctcctgctgtggtctgaatgtttgtcccttacataggaatccagatcactgcttctgggttctgagtgtttgtccttcacataggattccag

SEQ ID NO: 5227 - DNA, 151 bp, Protomyxzoa rheumatica
ggctctagggttttaaattttattgaagaaccagctttttaaaaaagcagctttgttgttaataatattttaaaagaatcagctttgttgttaataatattctcttgatttttctgttttcaatttcattgatttctgcaacaatttattt

SEQ ID NO: 5228 - DNA, 124 bp, Protomyxzoa rheumatica
aaaaactagaaaacagctttttgtgacactgctttgtgatttgtggtttcatctcacagagttcaccctctcttttgtttcagcaacttggaggcactctttttgtaaaatctacagagggaca

SEQ ID NO: 5229 - DNA, 141 bp, Protomyxzoa rheumatica
tttaaaagacattcattctcaaggtcataaaacatacacacacatctaattttcttttctctctcttttttttttacatttaatactggaattaatttttatgtaatgtgtgggaccatgattcaattctatcattttata

SEQ ID NO: 5230 - DNA, 306 bp, Protomyxzoa rheumatica
ccttcccatcagtccctgggttgggctccggttaccatggatcgccggttccaactcagggccctctcgggcccgctaggggtaccacaaagcgggcagaaggcccctgaggggaaggttaggtttgaggaaagggaggtgaggcacctgtggatgaaaaaaaaaaagaaaaaaactcagcgtcgagacgcattcctgggtcccccacggaagaaagtgccttcccatcagtccctgcactgggccttggatactctggcgtccctggttcgaacccagggagcgactcaggcccgctaggggtac

SEQ ID NO: 5231 - DNA, 173 bp, Protomyxzoa rheumatica
ccacttcaccacattccattcgattccattagatgccatgcgattccattccatgcgattcctttccaggcgatccaattccatttgattctattccattcaaatccatcccattcgattccattccattcctttccattccatttcattgcattgcattccattccattcca

SEQ ID NO: 5232 - DNA, 392 bp, Protomyxzoa rheumatica
attccattccattccattgtattcctttccatgcaattccatttccttcgagaccgttccattacaatccattcaattagagtccattctatttgattacattccattttattccattctattcgaatatattgcattcgagtccattccatttctgtccattactttccactctattccgttccattccagtccattcttttccattcgactccatttgattgcattccattccattgcattctattctattccattcgagaccattccatttcaatttattcaatttttaccattctattagactccattccattccattccatgcagttccattctatttgattccttgccatgccattccattccattcaattccattccattccatt

SEQ ID NO: 5233 - DNA, 264 bp, Protomyxzoa rheumatica
tagacaagagttacatcactttgtggatccgttcagagatgtgtcatgctgactgtttactcctggagatctgcaggcacccggaaacatgcagggaagggtggaaaaccgtcatggtgccttcactctcctggccagtttccaaaccggccacactgcagactccccatgttgtcacacacgggaatccatcatcaggccatcacgccgggttgcatcttctctctgggatctcactctggtctcctgcacggaaatgaacga

SEQ ID NO: 5234 - DNA, 129 bp, Protomyxzoa rheumatica
gaggcctatggtggaaaaaacataccttcacataagaactgtgaagcaggtttcctaaaaacagccttgtgatgtgtgcattcatctcacagaggtaagcatttcttttctctgatcagtctggaaact

SEQ ID NO: 5235 - DNA, 176 bp, Protomyxzoa rheumatica
tttgtaatgtatgcattcatctcacagaggtaaacatttcttttcattgagcagatgggaaaatcttttcttgtagaatctacaaagggatatttgtgagtgctttgaggcctatggtgaaaaaggaaatatcttcatagaaaatgtagacagaaactttctgagaaacttatttg

SEQ ID NO: 5236 - DNA, 166 bp, Protomyxzoa rheumatica
tcacacagaattccagaacactgctacgatggtctgaatgcttattcctcatataggattccagaacactgctgtgagggtctgcatgtttgtccctcagataggattcctgaacaatcctgcagtggtctgaatgtttgtccctcacaggggattccagaacaaa

SEQ ID NO: 5237 - DNA, 127 bp, Protomyxzoa rheumatica
aatggaatggaatggaatggaattgaatgaaatggaatggagtggtatagaatgaaattgatactgctcgattggaacggaatggagtgcaatagaattgaatggaatcaacccgagtggaatggaa

SEQ ID NO: 5238 - DNA, 129 bp, Protomyxzoa rheumatica
aatatcttcccataaaaagtagtcagaaggattctcagaaactactttgtgatggatgcattaaactcatatctttaaacactctttttgatagagcagttttgaaacaaactttttgtagaatctaca

SEQ ID NO: 5239 - DNA, 146 bp, Protomyxzoa rheumatica
gtttctcagacagattcctcttagtgtttatcctggggcattccattttttgccattgtccttaatgaactccaaaaggtccgttcagagaatggacaaaaacagtgttcctaaactgttgaatcaaaagaaatgtttaattctgt

SEQ ID NO: 5240 - DNA, 299 bp, Protomyxzoa rheumatica
ttgaggcctatgatggaaaaggaaatatcttcacataaaaactagacagatttctgagaaacttctttctgatgtatgcatttacctcaaaaatttaaacatttcttttgattgggagttttgaaactctctttttgtagaatctgcaaatggacatttggagagcttggacacctatggtggaaaaggaaatatcttcaaataaaaactaggtagaagaatcctgagaaacttctttgtgatgtgtgtgatcgtttttaggcctatggtggaaaaggaaatatcttcacataaaaact

SEQ ID NO: 5241 - DNA, 130 bp, Protomyxzoa rheumatica
gaatgtttgtctctcacataggattccagaaccctgcaacgagggtctgaattactctcactctcaaaggattccagaacactgtttttgggttctcagtgtatctcctcacagagaattccagaacact

SEQ ID NO: 5242 - DNA, 283 bp, Protomyxzoa rheumatica
tccattcaactacaccccattccacttcattcaattccattccaccgcattccattccaatccattccaccccactctacttccccgcattccatttgatgccttttgatttcattcgattccattctatgacaatggattccattccacttgattgcattccattcgattccattctattagactccttcctttcaatactattccattcgagtccataccattcgagtccattccattggagtccattcctttccattccattgcatttaattctattcca

SEQ ID NO: 5243 - DNA, 212 bp, Protomyxzoa rheumatica
tgacttcccaataatccccaaaatcttaaataatttcagtcttaactcaaaagtcaaaagtctcatctaagacaaggctaatttcttcctcctataagcctgtaaaataaaaaaaaaacaaaaaacaagttaggttcttccaagacataaatgaggcagaggcattgggtaaatattcctattctaaaaggaagaaatcagccaaaagaaag

SEQ ID NO: 5244 - DNA, 140 bp, Protomyxzoa rheumatica
tgaaaggcacatctcacatggcagcagacaagagtagagacctcgtgccgggaaagttccatttttaaaaccatcagatctcatgagactttttcactatcatgagaacagcatggaaaagatccaccctccatcattca

SEQ ID NO: 5245 - DNA, 129 bp, Protomyxzoa rheumatica
tgtgactcttgtctaagctctgcctagagggacattgggacatatccctgcactgatagctgaggtgatgcaaaacttgtctaggctttgcctgcagtgggatttatgacaaatctctgcactgatcac

SEQ ID NO: 5246 - DNA, 161 bp, Protomyxzoa rheumatica
cttccttgtgatgtttgccttgaaatcaaagaggtgaacgtaacttttcatagagcagttttgaaacacagtttcgtagactctacaagtggatatttagactgctttgaggccttcgttggaaaagagaatatcttcacataaaaactgcacagaagcat

SEQ ID NO: 5247 - DNA, 157 bp, Protomyxzoa rheumatica
gaatagaatggaatggaatggactcgaatgaacttgaatggactggaaagtaatggactagagtggaatggacttgagtggaatggcatcaaatggaacggaatcaaatggaaaggaatcgaatggaatggacatgaattgaacaggttgtaatgga

SEQ ID NO: 5248 - DNA, 127 bp, Protomyxzoa rheumatica
gtgcttctgtctagtttttacgtgaagatatttccttttctgccataggcctcaaagcactcaaaatatagacgtgcaaattccacaaagagtgtttcaatactgctctatcaaaagaaaatttaaa

SEQ ID NO: 5249 - DNA, 131 bp, Protomyxzoa rheumatica
ccaaacaaggcaatggactttcatcattcagcccttttcaaccactgatcttttaaacaggaaacagcatactccctcctacacggagaagcctcaagctcttatagatctgatgcaacccatctttctga

SEQ ID NO: 5250 - DNA, 413 bp, Protomyxzoa rheumatica
ccttggcctcccaaagtgctgggattacaggcatgagccaccgtgcccagccaaaactttctaacttcttaagctttagtttaatatcactttgggcctgtcctacaagtgacgtattcactatacactgattttcagtggcctcagggtcaaacggggtgaaagcctgtatgcctcacaaaatctttcataaaactggttagggctctcaacacttccttgaagcacttctgaaatcttctttatattaatggctttctttccaccatctcagtctttgcagaagtgcctcttggtacctctgcacatgctgaagctgagttgcatcccctgtgtcctagtaaggctcttggtctgggaactgaccttgagtgtatgcctgagcatgcactgcatctgcattatgcctgagc

SEQ ID NO: 5251 - DNA, 130 bp, Protomyxzoa rheumatica
tggaatggaatggaatggtgaaattgaatgtgagctaagattgtgccattgcactccactctgtgtgacagagtgagattcactcgaaataaaggaaatgaattgaatggagtagaatggaatggaatgg

SEQ ID NO: 5252 - DNA, 132 bp, Protomyxzoa rheumatica
attcttgtctaccctctgcccaaagggggcattgtgaaatgtctctgctctgatcacccaggtgattcaactcctgtctaggatctgcctacaggagaattgtgaaatatctctgtactgatcaactaggtg

SEQ ID NO: 5253 - DNA, 174 bp, Protomyxzoa rheumatica
ataaaagttagctggaactaagttggagtcccataactgctactaggctgagatgcaactcagaggatacaaaagccaggcttgcctagaattgcagttatgggaaagaaagtcacatttcacccaggaattataagcacgaaattccaagtttgtgaaatagattcctagatc

SEQ ID NO: 5254 - DNA, 126 bp, Protomyxzoa rheumatica
agaatctgcaagtggatatttggatagctttgaggatttcagaggaaacggcaatatctttatataaaaagtagacaggagcattttcagaaacttctttgtgatgtatgcattcaagtcccagag

SEQ ID NO: 5255 - DNA, 127 bp, Protomyxzoa rheumatica
gagatgtgtcatgctgactgtttgatcccagagctctgtgggcaccagtaaacatgcagggaagggtggaagaaaggcatggtgccttcgctctacttgccagtttccaaaccggccacactgcaga

SEQ ID NO: 5256 - DNA, 160 bp, Protomyxzoa rheumatica
tgattccattcgattccatttgctgatgattcctttcaactccattcaatgattccattcgattccattccatgatgattcccttcatctccattcaatgattctattcaattccattcgatgaggattccattcgagtccatttgatgattctatttga

SEQ ID NO: 5257 - DNA, 129 bp, Protomyxzoa rheumatica
gtgctgggattacaggcatgagccactgtttctggccatgttattttattctttagttctaaatattttataattcccctgattacctctttcacgcatgagttattgggcaacattttaaaacttctg

SEQ ID NO: 5258 - DNA, 152 bp, Protomyxzoa rheumatica
gtgatcactgcagagatatgtcacaatgcccctataggtagagcatagacaagagtcccaacacctgggtgatcattgcagatttatgtcacaatgtccgcttttggcagagcctagaaaatggttacatcacctgggtgatcaatgcagat

SEQ ID NO: 5259 - DNA, 123 bp, Protomyxzoa rheumatica
gagaatgctttcgtctagttttttagggatgatatttccttcttcaacataggcctcaatagctccaaatatccatttccacatattatacaaagagtgtgtcaaacctgctgtgtgaaaggg

SEQ ID NO: 5260 - DNA, 146 bp, Protomyxzoa rheumatica
attcacagaatggacatgaacagtgttttcaagccgctgaataaaaagaaagatttaactctgccagatgaatgcacacatcacaaaggagtttctcaaaatgatactttctagtttttatctgaagatgtttgctttttcaccat

SEQ ID NO: 5261 - DNA, 164 bp, Protomyxzoa rheumatica
tattccgttccattcagtcacattccattccattgcattccatacctttccataccattcgactcggtgttgattcatattcattctattccattccattccattacattacattccacttggcttgattcaattccattctattccattccattccattccat

SEQ ID NO: 5262 - DNA, 214 bp, Protomyxzoa rheumatica
cactccaataaggcaaatgttacaaccgaaaacctacaagcacacctcagagatagtctgggtttggttccagagcactgcagtaaggcaaatgttacaaccaaaaacctacaagcacacctcagagacagtgtgggtttggttccagaccactgcaataaggcaattgttacaatcaaattagttgcataaacattttctttcccagtgctta

SEQ ID NO: 5263 - DNA, 133 bp, Protomyxzoa rheumatica
tatacttaaaacaatattctatgcaaaatgctataatttcaccatgcctcctatttggacatgataaaactgggtctcgtaaagttttcaccccagagttctctgcttagtaagaagtagaagtaagtctaat

SEQ ID NO: 5264 - DNA, 136 bp, Protomyxzoa rheumatica
cagagttctctgcttagtaagaagtagaagtaagtctaatcctaagttatctgatttcagagcccatatagttaaatgctctaaatgcagcttcccctggtgatggtgactctgagagcctgtcacatgatgtagg

SEQ ID NO: 5265 - DNA, 191 bp, Protomyxzoa rheumatica
tgtgctccaaaatataacttcaaagatactacaaaaacagtgtttccaaacagctgaattaaaagagatgtttacctctacgagatgaatacacacatcaaaaagcagtttctcagatttcttcctcttagtttttatcctgggacatttaccttttcaccattgacctcaataagctcccaaatgtccat

SEQ ID NO: 5266 - DNA, 144 bp, Protomyxzoa rheumatica
atttaggatctcactgaggccaatggtgaaaaacaatataaattcagataaaaactagacagaaatttctgagaaactactttgtgatgtgggcattcatctcacagagataaacctttcatttgattcagcagtgtggaaaaa

SEQ ID NO: 5267 - DNA, 239 bp, Protomyxzoa rheumatica
ctgtctagttttttctggggttattctgtttttcccgtaaaccactctggactcccaaatgtatctttgtagattttacaaaaagagtgtttccaacctgctgaatcaagggaaaggtttaactctttgtggtgtgtgatgtaatccacacatcacaaagcagtttcatatatccttctttttagttttcatctggggatactaggtttttccccataagtctgcatgagctcccaaat

SEQ ID NO: 5268 - DNA, 182 bp, Protomyxzoa rheumatica
gtacattgcattgctttccattccattgttttcgaatccattcagttccattccgttacttttgagtcctttcgtttccattccattagagtccattccattaaatgccattgtttttcattgctttctatttcattctattcttttcaattccattccattctattccattccattccctt

SEQ ID NO: 5269 - DNA, 135 bp, Protomyxzoa rheumatica
gactcgaatggaaacatcatgctatggaatcagatggaaccatggattggcagcgaattgaatcatcagtgaatggaatctaagggaataatcgaatttaaccgaatggaatcatcaaatggactcgagtggaat

SEQ ID NO: 5270 - DNA, 200 bp, Protomyxzoa rheumatica
gagacacagatcttcataccagggccaggtcttacctcttcacacattgacagacgcagatcttcatgtctgtaagagattcctacctcttccaacatggagagacccagatcctcacacctgtactatattcctatctcctcagatattgaaagactcagatcctcataccatggccagatcctaccttctcagacatt

SEQ ID NO: 5271 - DNA, 135 bp, Protomyxzoa rheumatica
agaaactgcaaagggacaattgggagcctattaaaggctgaaggttggaaaccctcttcttggaaaatctgcacaggaatgtttgggagcccattgtgacctatgggaaaaaaaccaagtatcttcagataaaaa

SEQ ID NO: 5272 - DNA, 259 bp, Protomyxzoa rheumatica
tgtctagggtccacctacagggggtattgtgacgtatctctgcagtgagcactcaggtgatgtaacatttatctaggctctgcctgcaggggagttttgaaatagctctgcactgatcacctagattatgaaacttttgtccactctctgcctacagtggacattgtgaaatatctcttcactgatcacacgggtgatggtactattctctatactcttcctagagggggatttgtgacatatctctgcactgatcacc

SEQ ID NO: 5273 - DNA, 208 bp, Protomyxzoa rheumatica
atcgaatgaaatggactggaatggaacgtactggaatggaatggattcgaatggaacagactcgaatggaatggattcaaaaggaatggactcgaatgatctctaatgcaatgggctcgaatagaattttctccaatggaatggactcaaattcaatgcaatcgaaaggaatggaatcgaatggaatggaatcaaaaaaactggaatg

SEQ ID NO: 5274 - DNA, 369 bp, Protomyxzoa rheumatica
ctaatgtgcaagggagcctgctggcccctctgtgcccctgtccatccgtgaaattccggctgaggctctcccaacaccttccaacgctcttcactcaaagcctggagaatagttacatctcctggatgatcagttcagaaatatgtcacaatgccccctccctgcagagcctagagaagatttgcatcatttgggtgatcagtgcagagatacatcacagggtcccctgtacaaaaagcctggaaatgatttacatcacctcggtgatcagtgcataggtatgtcagaaatactcagtaggctgaacctagacaagcgttaaaaaacttaggtgatcagtgtagagatatgtgaaaattcccgtgtaga

SEQ ID NO: 5275 - DNA, 171 bp, Protomyxzoa rheumatica
gatttcttcatataaaactagacagaagaattctcagaaattactttgttatgtgtgctttcaattcacagagttgaacctttctttggatagtgcagttttgagactctctttttgtagtatttccaagtggatctttagtgccatttaagacatatggttgaaaaggca

SEQ ID NO: 5276 - DNA, 150 bp, Protomyxzoa rheumatica
ttccaatccatactattgcattccattcgattcctttctattcaaataagttccattcgagaccattcctttaaagtgcgttctatttgattccattcgtttcgagtccattacatttgggtcgattcctttccattccattcgatgcca

SEQ ID NO: 5277 - DNA, 187 bp, Protomyxzoa rheumatica
tcaccaggttggaaatactctttttgtaaaatctgtgaagggatattagggatcccatcaaaaacctgaatatccccagataaaaactagaaaaaactatgtgtgaaactgctttgggatatgtgaattattctcaaagagtttaatcttcctattgattcaacagacttgaaacactctttttcta

SEQ ID NO: 5278 - DNA, 132 bp, Protomyxzoa rheumatica
tggaatggaatggaatagaagggaatggaatgctagggaatgcaatggaatggtatggaatggaatggtagggtatgtaatgtaaaggaatggattcaaaacgagtcgaatggaatgtaatagaatgaaaag

SEQ ID NO: 5279 - DNA, 153 bp, Protomyxzoa rheumatica
atgattccattcgattccattccatgatgatttcattcgcatccatttgatgattccatttgattccattctccgatggttacattcgagtcctttcgatgattctactcgattccatacgatgatgattctgttcaattccattcgatgatt

SEQ ID NO: 5280 - DNA, 148 bp, Protomyxzoa rheumatica
cgaatcaattacattgcagtccattacattcatgccctttctattaaagtccagtccattatggtccattccattccattctattccattccattcgaatcaattactttgcaatccatcacattcgagtacgttctgttccagtcca

SEQ ID NO: 5281 - DNA, 217 bp, Protomyxzoa rheumatica
tcttctgtgtagtttttttgtgaagatatttccttttccatattaggccgcatagggctcccaatatccacttgcggattattgaaaaagacagtttcaaaaccgctctatcaaaaaataggttcaaatctgtgagtagaatgaatacatcacaaagaagtttctcagaatgcttctgtgtactttttatgagaagatatttccttttctaccatag

SEQ ID NO: 5282 - DNA, 171 bp, Protomyxzoa rheumatica
gcttctgtctagattttatgtgaagatatttccttttccagcatagacctcaaagcgcacaaaatgtccgcttgcagatccttcaaaaagaggatttcaaaactgatccttcataagaaagattaaactttgagatatgaatgtacacatcacaaagaggtttctcagaat

SEQ ID NO: 5283 - DNA, 192 bp, Protomyxzoa rheumatica
tgaagatatttgcttttccacagtaggcctcaaagtgctccaaatatccacttgcagatacggcaaaaagggagattcaaaactactcaattaaaagatatgttcaactctgtgagttgaaagcaaacctcacaaagaagtttctcagaattcttctgcatagtttttatgtgcagatatttccttttccac

SEQ ID NO: 5284 - DNA, 140 bp, Protomyxzoa rheumatica
tttgtgagttgaatacagacatcgcaaaatgtttctaagagtacatctgtctactttttatgtgaagatatccccgtttccaaagaaaacctcaatgcgctccaaatatccagttccagactttaaaaacagagtgtttc

SEQ ID NO: 5285 - DNA, 162 bp, Protomyxzoa rheumatica
gtgcattcatctcatggagttgaatctttctctcgattgtgcagtttggaaacagtcttcttgtagaatctgcaaaagtatatttagagtgctttgacgcctatggtgaaaaaggaaacatctacacataagaactacagagaagcattctgagaaacttct

SEQ ID NO: 5286 - DNA, 440 bp, Protomyxzoa rheumatica
ggaatggaatcagtcaactggagtggagtggaatggaatataatggaatgaaatgaaatggaatggattggagaagagtggaattgagtggagtagaatggagttgagtggaatggagtggaatggaatggaatcagtgtactggagtggagtggagtggaatacaatggcatggaatgaaattgaatggaatgttgaaatgaaatatgagctgagattgttccacagcactccagcatgggggacagagtgagaacctgtctaaagaaaggaatggaatagattggagtagaatggaatggagtggagtgaagtggagtggtgtggaatggaatggagtggagtggaggggaattgagaggagtggagtggaatggactggagtgggatggaatggtctgtagtggaatggaatggaatggaatggagtttaatggaat

SEQ ID NO: 5287 - DNA, 127 bp, Protomyxzoa rheumatica
ctaatttttaggtgaagatatttcctttccaccattggcctctgcgctctcctaatgtccacttgtagatactgcaaagtgagtgtttcaaaactgctttatcaaaaaaaagttcgactctgtgagt

SEQ ID NO: 5288 - DNA, 137 bp, Protomyxzoa rheumatica
gcaatggaatggaatggtgaaatgcaatgagagctaagattgtgccactgcactacagtctgggggacagagtgacatccaatcgacattgatgaatgcaatggaatgaagtgaaatggaatggagtggagttgaat

SEQ ID NO: 5289 - DNA, 241 bp, Protomyxzoa rheumatica
ctttgagcagtgttttgtaaatctcattgtagagctctttcacctccctggtgagctgcatttccagatattttattattttagtggcaattgtgaatgggatggcctttctgattttgctgtcagtgtggttatcattggtgtagagaaatgttagtgatctttgcacattgatttagtatcttgaaaattcgctgaagttgtttgttaactaaagaagctttgtagatgaaactacagg

SEQ ID NO: 5290 - DNA, 134 bp, Protomyxzoa rheumatica
ggaggctgaggcaggcagatcacaatgtcaggagattgagacaatcctagctaacacggtgaaacctcgtttcttctaaaaataaaaaaatttagccatgcatggtggtgggcacctttagtcccagctactca

SEQ ID NO: 5291 - DNA, 143 bp, Protomyxzoa rheumatica
tcccctgtaggcagtgcctaggcatgagatgcatcacctcacagatcagagcatagatatgccacaaagccttctgtaggcaacgcccatacaaggcttacaccacctaggtgatcagtgcagtgatatgtcacaaaaatccc

SEQ ID NO: 5292 - DNA, 152 bp, Protomyxzoa rheumatica
tccatcacataggattccaaaacactgctgctgagttctgactgtttctccctgagatagaattccagaacactgtgacgaggtactgaatgtttgtccatagcataggattccagaacccacccaccgttttttgaatgtttgtccctcac

SEQ ID NO: 5293 - DNA, 197 bp, Protomyxzoa rheumatica
ctatttgaagcctatgttggcaaaggaaatatcttcacagaaaaactagacagaagcattctcaggaccttgtttgtgatgtgtccattcaactgacagagttgaacatttcttttgatagggcagtactgaaacactacttttgaaggatctgcttgtgtatatttttagctcttggaggatttcgttggaaacga

SEQ ID NO: 5294 - DNA, 191 bp, Protomyxzoa rheumatica
acaatcattcagaccacagctgagttgttctttaatcctacgtgtgggacaagcattcagaccctcatagcagtgttctggagtcctatgtgcgggagaaacattcagacccttgtaggagtcttcaggaatcctatgtgagggacatacatttagacccacgtagcagggttctggaatcgtacttgagg

SEQ ID NO: 5295 - DNA, 152 bp, Protomyxzoa rheumatica
ctacgaaagtctgaatgtttgtccctcacataagattccagaacactactgctgtggtctgaatggttgacccacccaaaggattccagaacactcctgctgtggtctgtgggtttttgcctcacatgggattccagaagaatcctgctgtg

SEQ ID NO: 5296 - DNA, 142 bp, Protomyxzoa rheumatica
ccattctattcctttccattacattccactgcagacctttccattccattccactcctctgaactccattccacttcacacaactcctttccaattcagttcactccattccattcccctctattcctttcccttgcattcc

SEQ ID NO: 5297 - DNA, 308 bp, Protomyxzoa rheumatica
cattccattctattccattccactccactccactccataccactccactgcactccactccatcccattccactccttttattcgacaggatctccctccgtcacacaggctgtagcgcagtggcacaatctcagcacccgttctgttccattccgttgcactctattccgttccattctgttccaccacactccactccactccattccactccactccactacattccattacataagattccattcctgtccattccactactctccactgcactgcactacattccacttcattccactccatt

SEQ ID NO: 5298 - DNA, 149 bp, Protomyxzoa rheumatica
aagtttctttctagattttatctgaagatgattctttttcactgtaggcctcaatgctctctgaaatatctgtttgcacattggcaaaaacagtgtttccaaactgcttagtgtaaagtaaggtttaactctgtgagagggaagcacgc

SEQ ID NO: 5299 - DNA, 345 bp, Protomyxzoa rheumatica
tggattctattcgatgatgattccactcatttccactccatgatgattccattcgtttccaggtgatgacgattccattagattctattcgatgattcaatgctattccatttgttgaagattccattcgattccatttgatgattattccatttgagtccattcaatgattccattcgataccattcaatgatgattacattcgagtccattcgatggttccatttgagtccatttgatgattccattagagtccattcaatgaagattccattcgatgattccatttcattccattaggtgatgatttcattcgagtccattcgatgattccattcgattcca

SEQ ID NO: 5300 - DNA, 123 bp, Protomyxzoa rheumatica
ctgctctatcaaaagaaaggttcaaagatatgaattgaacacacacatcacaaaggaggttcagagaatgtttcagtctagttttaatgtgaagatatcaccttttcccacataggcaacaaa

SEQ ID NO: 5301 - DNA, 148 bp, Protomyxzoa rheumatica
ctcttcaaggattccattcgatttcattcaaagatgattccattcgaatccatttgatattttcattcgagtcaattcaatgattcactttgagtccattttattccattcgatgatgattccattcgattccaaactatgattattc

SEQ ID NO: 5302 - DNA, 133 bp, Protomyxzoa rheumatica
gacaatttggcaacagaaataaatgcaagccatctagattagaaaagaagtaggccaggcatggtgtcacaagcctgtaatcctagcattttgggagtccaatgtgggtggatcctttgaggtcaggcattca

SEQ ID NO: 5303 - DNA, 238 bp, Protomyxzoa rheumatica
aagaagtttctcagaattcttctgcctagtttttatgttaagatatttccttttccaccatggtcctcaaagcgctccaaatgtaaacttgcagactctacaaaaagagagctttgaatctcctcaatcaaaggaaagttttaactctttgaggttaatgcacacatcacaaaggagtttctcagattgcttctgtctagattttatgtgaggatcttaccttttctgacataggccg

SEQ ID NO: 5304 - DNA, 195 bp, Protomyxzoa rheumatica
ttcttcatataaaactagacagaagaattctcagaaactgctttgtgatgtgagctttgaactcacagagttgaatcttccttttaatagagcagttttgaaatactctttttgtaatattttcaacgggatatttagcaccgtttgaagcctatggtagaaaacgcaatgtcttcatagacaaactagacagaa

SEQ ID NO: 5305 - DNA, 134 bp, Protomyxzoa rheumatica
ttgcagattccacaaaaacagtgtttcaaaacagctcaatcaaaagaagggatcaactccgtgagatgaatgcactcatgaaaaagaaatttctcagaatgtttctctgcagtttttatctgaagatatttggt

SEQ ID NO: 5306 - DNA, 171 bp, Protomyxzoa rheumatica
tcgaatggcatcaaatggaatcatcatcaaatagaatctaatgaaataaccgaatggactcgagtggaatcactgaatggagtcaaatggaatcatcaccgaatcaaatcaagtggagtcatcgaatagcatcgaatggaatcatcattgaatggaattgaaaggaatcat

SEQ ID NO: 5307 - DNA, 151 bp, Protomyxzoa rheumatica
acttctgtctagtatttttgtgaagatttttccttttcctctatacgcctcaaactgctccaagtatccatttgtagatactacaaaaagagtgtttcaaaactcctcaaccaaaagaaagtttcaactctgtgagttgaatgcacacatc

SEQ ID NO: 5308 - DNA, 182 bp, Protomyxzoa rheumatica
tggaatgcaacgaagaaatgaaatgtgagctaagattgtgtcactgcactccagtctgggagacagagtgagatgcaatcgaaataaaggaatggatggaatggagtaaaatgcaatggaatagattggtgtggaatggaatggaatggaacggagtggagtggagtggaatggaggggagt

SEQ ID NO: 5309 - DNA, 130 bp, Protomyxzoa rheumatica
gagtagagtggagtggagtagaatggagtggaatcaagtggactttaatggagtggaatagagaggaatggaatggactacaatggaaaggactaaaatggaatacagtgaaatggaacggaatcaaatg

SEQ ID NO: 5310 - DNA, 177 bp, Protomyxzoa rheumatica
gacaagagttccctccccagggtgatcagtgcagaaatgtgtcacaaagccccttctggcagagcctagataagggttacatcacctggatgatcagttcagagatgtgtcacaagcccttgtagccagagcgtagacaagagttacatcaggtgtgtgatcagtgcagtgacatgt

SEQ ID NO: 5311 - DNA, 184 bp, Protomyxzoa rheumatica
aagtggatattcagacctctttgaggccttcgttggaaacgggatttcttcatactgtgctagacagaagaattctcagtaacttccttgtgttgtgtgtgttcaactcacagagttgaactttcatttccacagagaagatttgaaacactctttttgtggaatttgcaagtggagatttcaa

SEQ ID NO: 5312 - DNA, 275 bp, Protomyxzoa rheumatica
acagagtttaaaatttcttttgattcagcgagatggaaacactctttttgtagaataagaaaaaggacactttggagtcccttaaggagtatggggaaaatggaatattcccatataaaaaccagaaacatctttccatgaaactgctttgtgatgttttgattcatctcacagagttaaaccttcctgttgattcagcagattggaaacacactttttggagactctgcaaagggaaattttagagccaattgacgcctaagaaagttacctgt

SEQ ID NO: 5313 - DNA, 360 bp, Protomyxzoa rheumatica
gacattatgtgaagatatttccttttccaacataggactcaaagtggtccaaatgtccacttgtagatgctacaaaagagagtttcaaaactgctatatcaaaagaaaagtttaactccatgagatgaatacacatatctcaaagaagtttctcagattgcttctgtctagattttttgtgaagattttcttttttactaccataggctgcaaagcgctccaaatgtccaatagcagattctacaaaaagaatgtttccaaactgctcattcaaaagaaagattgaactctgtcagatgaacgcacacatcacaaagaagtttcacagaattcttttgtctagtttttatgtgaagatat

SEQ ID NO: 5314 - DNA, 204 bp, Protomyxzoa rheumatica
tcaccaggcagtttctcagatagcttatgtctagttcttctctgaaaatatttccttttccaccatagacctcaatgtgctcccaaatatccctatgcggattctataaaaacagcatttctaaactgttccatctaaggaaggacttaactctgtgagatgaaagcagtttctcataaggcttctttccagtttttatctgaa

SEQ ID NO: 5315 - DNA, 189 bp, Protomyxzoa rheumatica
aagctctgcctagagggacatctggacatgtctctgcactgatggctgaggtgaagtaaaaattgtctaggcttcgcctacagtgggatttatgacatatccctgcactgatcacccaggtgatgtaagtcttgtctaggctctggtttcaggggttattgtgagatatctctgcactgatcacccagg

SEQ ID NO: 5316 - DNA, 138 bp, Protomyxzoa rheumatica
actcaaatggaattatcaaatggactcaaatggaattatccaatgcactccaatggaatcaacatcgaacggactctaacggaatgattgaaaggactctaatggaatcgttgaatggaaatgaatgtaatcattgat

SEQ ID NO: 5317 - DNA, 160 bp, Protomyxzoa rheumatica
acagagacttgcagactcatctaagccttgtaagactcaataacacgtttaaaaaaatcataactgcttttttggttacatattatagagtcattatttaattctgaatctagctttaaattttgtttaaagtaggaaatattttttgttcccacttaat

SEQ ID NO: 5318 - DNA, 320 bp, Protomyxzoa rheumatica
tcaaagccctctaaatatccacttgaagatattacaaaaacagtgtttcaaaactgctgaatcataaaataggttcaactctgtgatttgaatgcacacatagcaaagaagttcctcagaatgcttctgggtagttttaatttgaagatatttccttttcctccataggccacaaagggctccaaatgtccacttgcagatcctacaaaaagtgggaatgaaaactgctcaatgaaaagatatgttcaactctgtgagtttaatgcacatatcaccaagtagtttctcagaatgcttctgtgtagtttttatgtgaagat

SEQ ID NO: 5319 - DNA, 211 bp, Protomyxzoa rheumatica
ttgtagaatctacaagaggatatttggatacctttgcagcctatagaggaaaaggaaatatcttcaaataaacactacacagaaggattctaagaaacttctttatgatatgtgcattcatttgacatagttgaatctttcttttgattgagcagttttgaaactcagtttttgtagaatctgcaagtggatatttggagccatttgaggc

SEQ ID NO: 5320 - DNA, 154 bp, Protomyxzoa rheumatica
ttcattttccctcagcagtttggagaaactgtttttgtagaaactgtgaagggatatttaggaacacatagaggcctaaggtgaaacagaaaataacttcagataaacactagaaatgagctttctgaggaactgctttgtgacgtgtgcattc

SEQ ID NO: 5321 - DNA, 126 bp, Protomyxzoa rheumatica
cctcacagagcagtttctcagaaagcttctttctagtttttatctgaaaatgtttcctcttttaccatattcttcaatactctccaaaatatccctttgcagactctacagaaacagttttcaaaa

SEQ ID NO: 5322 - DNA, 138 bp, Protomyxzoa rheumatica
caatggaatggaatcaaatggaaatggaatggaaaggaatagactcaaaaggaattgaatcgaatggaatggaaacgagtgacatcaaatggaatcgaatggagtgccataaataggaatgcagtggaatggagtgga

SEQ ID NO: 5323 - DNA, 138 bp, Protomyxzoa rheumatica
cacactttttattgaatctgcaagaggatatttggacagttttgaggatttcgtctaaaaagggaatgtcttcatgtaaaagctagaaagaagcattcccagaaacttctttgcgatgtttccattcaagtcaaagag

SEQ ID NO: 5324 - DNA, 212 bp, Protomyxzoa rheumatica
aatggaatagaatggaatggagtggtgaaaggaaatgtgagctgagtttgtgccactgcctgccagtctggttgagaggttgagatgctgtcgaaagaaaggaatggaatggaatggagtggagtggagctgggtggagtgcagtggtgtggagtggaatggagtggaatggaatgggatggagtggaatggaatggagtgcagtgagtgga

SEQ ID NO: 5325 - DNA, 322 bp, Protomyxzoa rheumatica
cagtcaattccattcgagcccattctattccaatccatttcactccagtccattccatttgagtccattccattcgagtccattccattccagtccaatctattccagtctattccgtttgagtctattctgtcggagtccattatattcttttccattctcttccctttcctttccttcctttccattcctctccacttcactcctttccattcctttccacttcactccattccattccactccactccattctattccactgcattccactccattccacttttccattccattccattccattccattccattccatt

SEQ ID NO: 5326 - DNA, 130 bp, Protomyxzoa rheumatica
ttcgagtccatttgatgattccattggactccgtttggtgatgattccattcaatgattcctttcgattctatttgatgttgattccgttcaattacattcgatgctgattctattcaattccattcgat

SEQ ID NO: 5327 - DNA, 262 bp, Protomyxzoa rheumatica
aatgtttgaagtgttaaatatgctaattactctggttggatcactgtacagtgtatgtggttcagtgtgatgaagtgaaacatcatataattaacataattgtccacgtttgtggagtacaatgtgatgtttcactgcatcacactgtaccatgtagtatgacgccgtgaaacatcacactgtgccccataaatattactggttcagcagggaactgtgggacacagagcagctccaggttagccaagatcggaagagcggt

SEQ ID NO: 5328 - DNA, 134 bp, Protomyxzoa rheumatica
aattccattcctttccattctactccattgtattacattcctttctttcgaaaggaactcactctgtcacataggctccattgcactgaaccaaactcagctcacatttcatttcaacattccattcaattcca

SEQ ID NO: 5329 - DNA, 129 bp, Protomyxzoa rheumatica
agacgacagcaggagtgttctgcaatcctatgtgaagaacatatatttagaaaacagcgttagtgttctggaatcctgtgtgcaggacaaatattcagagccttgtatcagtgtttggaatcctttgtg

SEQ ID NO: 5330 - DNA, 123 bp, Protomyxzoa rheumatica
tggaggtctatggtaaaaaaggaaataacttccaataaaaactagacagaaggattctcagaaagttttgttatgtgtgcactcagctgacagagttgaacttttcttttgatagagcagttt

SEQ ID NO: 5331 - DNA, 199 bp, Protomyxzoa rheumatica
cagtttggaagcagtctttttgtaatatctacaaatggatatttgcatcactttacttcatggaatggaaaaggaaacatcttaacataaaaactagacaaaagcatattgagaaacttctctgtgatgtgtccattcatctcatagagtaaaatcttccttttgattgagcaggtttgaaacactctttttgtagaat

SEQ ID NO: 5332 - DNA, 161 bp, Protomyxzoa rheumatica
atcctatgttacggacaaacattcagaccctcgtctcagttttctggagttctatgtgagggaggaagactcagaatcctgcagcattgttctggaatcccatgtgacagacatacatgtagagccctgcagccatcttctggaatcctacgtgagggaca

SEQ ID NO: 5333 - DNA, 241 bp, Protomyxzoa rheumatica
cattccattctattcctttccattccattccattccatttgtttccatttcattcgattcattctattcgaataaattccattagagaccgttcctttcgagtccattctgtttgagtctattccattccagtccattacatttggttccattccatttccttccattcctttccattccatacgttgccattccattcatttctattccattcgactccattccattccattccattcca

SEQ ID NO: 5334 - DNA, 316 bp, Protomyxzoa rheumatica
ctcctgctgtggtctaaatgtttgttcctcactaaggatttcagaacattcctgctgtcgtctgaatgtttgtccctcacataggataccactacactcctgctgtggattgaatgtttctccttcctttagggttccagaaaacagtttttgggttctgagtgtttgtccctcacgtacgattcaagaacactgctaggtgggtctaaatatttgtccctcacataggattcgagaaccatgctacgagagtctgcatgtttgtcccgcacgtaggactcaacaacactcctgctgtgttctgaatgtttgtccc

SEQ ID NO: 5335 - DNA, 269 bp, Protomyxzoa rheumatica
attctcagaaacttctttgtgatgtgtgcattcaactaacagagttgtatcttttttttcatagagcagttttcaaacacacttttggtagaatatacaagtggacatttggagagctttgaggcctatggcagaaaaaaatatctccacataaaaactacatggaagcattctgagaaacttttttgtgatgtgtacattaatctcaaggagttgaacattgcttttgattgagcagttttgacacattcttttttgtagaatctgca

SEQ ID NO: 5336 - DNA, 146 bp, Protomyxzoa rheumatica
cagaagcattctgagaacttctttgtggtgtctccattcatctgacagaactgaacgtttcttttaattgagcagtttggaaaccatatttttgcagaatctgcaaagggatatttgtgagccatttcaagcctatagtgaaacag

SEQ ID NO: 5337 - DNA, 201 bp, Protomyxzoa rheumatica
tcgactccattcagtgatgattccatttgatttcattcgatggtttcagtcgattccattcaatgataattccattcgtttcctttcagtgattccattcaattccatatgatgatgattccattcgattcgattcgatcatgagccattcgattcaattccatcatgattctctttgatctaattccatgatgtctccat

SEQ ID NO: 5338 - DNA, 152 bp, Protomyxzoa rheumatica
tgagttgaagtcacacatcacaaggaaggttctgagaatgcttctgtccagtttttatgtgaagacatttccgtttccaacgaaggacaccaagcggtcaaaatagccacttgcagattctacaaaaagagtgtttcaaaactactctacaa

SEQ ID NO: 5339 - DNA, 207 bp, Protomyxzoa rheumatica
tgattgtccctcacataggattccagaacactgctgctggtttttgagtgtttctccctcacgtaggattccagtacactgctacgagtgtctcaatgattgtacttcacagaggattaaagaacactcctgctctggtctgaatgtttgtccctcagataggattccagaacactgctgcaaggttctgagtgtttgtccctcaca

SEQ ID NO: 5340 - DNA, 132 bp, Protomyxzoa rheumatica
atggaatcatcatcaaatggaagcacatggaaatatcaaatggaaaagaattgaataatcatagaaaggaattgaatagaaacattgactaaaatcgaatggaatcatcatcgaatggaattgaatggaatc

SEQ ID NO: 5341 - DNA, 131 bp, Protomyxzoa rheumatica
agtttctcagaaagcttgttttccttttttgtctgaaggtatttcatttttcaccataggccctaatgcacacccaaatatcacttcactgattctacaaaaacagtgtttcctaactgctgaatgcaaaa

SEQ ID NO: 5342 - DNA, 198 bp, Protomyxzoa rheumatica
actttcttgttattaatttctaggttcactctattgtgattggagtacatgctgttcagttcctttaatggcctagtgtagagtctatgatggacaatgttgatgagcccttgagaagaatgtagcttctcttgttgtgtggaatgttttgcgtgtgcttttcaggtctagctgaactatgaagttgtttgagtcttc

SEQ ID NO: 5343 - DNA, 135 bp, Protomyxzoa rheumatica
caaacagttttctcaaaaagctactgtgtcgtttttatgtgaagacgtttcctttttcactctaggcctgaaaactctctaaatatacattcacagattctacaaaaagactgattccaaactgctcaatcagaa

SEQ ID NO: 5344 - DNA, 123 bp, Protomyxzoa rheumatica
agcagtgttctggaatcctatgtgagggacgaacctttagaccccagcagcagtgctcttgaatcctacgtgaggaaaaaacattcagacactcgtagctttgttctcgaatcacatgtgagg

SEQ ID NO: 5345 - DNA, 382 bp, Protomyxzoa rheumatica
gtcccccacataggattcgaaaacactgctgctggggtctgtatgtttgtccgtcacataggttcctgaacactactacgattgtttcaatgtttgtccctcatataggattatagaacactgcactgagtgtctgaatgtttgtccctcacttgaggttccagagcactgctgctgggctctaaatgttggtccgtcacataggattccagaactatgctacgagggtccggatatttgttcctcccattggattccagaacaatcctgctctagtccgaatgtttgtccttcatataggcttccagaacgctgctatgggggtctgaagcttcctccctcacaaacatctccagaacactgctacaagggtctgaatgat

SEQ ID NO: 5346 - DNA, 132 bp, Protomyxzoa rheumatica
agcagttttgtaacaatctttttgcagaatctgcatgtggctatttggacctctttgtggccttcggttgaataatgttttcttcatataaagccagaccgaagaattctcagaaacttctttgtgatgtgt

SEQ ID NO: 5347 - DNA, 159 bp, Protomyxzoa rheumatica
tggtgaaaaaggaaatatcttcccctaaaatctagacagaagctatttcagaaacttgtttgtgatgcgtgtactcaactaaccgagttgagccttagttttgataaagcagtttggaaacactctttttgttgaatctgcaagtggatatttggatag

SEQ ID NO: 5348 - DNA, 193 bp, Protomyxzoa rheumatica
attccattcgattccatttgatgattccattcatttccattcgatgatgattccattcgtgtccatttgatgatttcattcgattctatttgatgatgattccatttgaggccattcgatgattgcattcgagtccatttgatgatttcacttgattccactcgatgacgattccttttgagtacattcgatg

SEQ ID NO: 5349 - DNA, 135 bp, Protomyxzoa rheumatica
cttgtttctcatgtgtgaattcaactcacagagttgaacatttttttttgatagagccatattgaaacaatctttttgtaaaatctgcaggtggacattcggagcgctttgaggcctatggtgaaaaagcaaata

SEQ ID NO: 5350 - DNA, 174 bp, Protomyxzoa rheumatica
gattccattgaggatgattgcatttgattccattcgttgatttcatttgagtccattcaaagatgattctatttgattcaattccaagaatattccgtttgagtccattcgatgattccgttcgattccattccatgattccattcgtttccatttcatgattcattttaatcc

SEQ ID NO: 5351 - DNA, 132 bp, Protomyxzoa rheumatica
gttcaactctgtgagatgaacgcacacatcaccacgaagtgtgtcagaattctcctgtctagttattatttgaaagtattaccttttccagcataagcctcaaagtgaaccaaatatccacctgcagtttct

SEQ ID NO: 5352 - DNA, 152 bp, Protomyxzoa rheumatica
tgtgacagagggagatcctgtcgaaagaaaggagtggaattgaaggcactggaatggaatggaacggaatggattgaagtggagtggagtggaattgagtggagtggagtgaagtggaatagaatggaatggaaaggaatggaatggaatgg

SEQ ID NO: 5353 - DNA, 154 bp, Protomyxzoa rheumatica
atttcaggatttcattggaaacgggaatatcttcatataaaatctcaacagaagcattctcagaaacttctttgtgatatgtgcattcaagtcacagatttgaatgttccctttcacagagaaggtttgaaacactctttttgtagtatctgga

SEQ ID NO: 5354 - DNA, 168 bp, Protomyxzoa rheumatica
ttattcgaatagaatggaatcgaatggaatgcaatagtatttaatggaatcaaatgtaatctaaccaaatggagtggaccgatatggaatggactggaatagaacggactcaaatgtaatggattgcaatgtaatagatttgcatggattggaaaggaatggaatata

SEQ ID NO: 5355 - DNA, 218 bp, Protomyxzoa rheumatica
cagaaatacaaaaaaaattccatagaaaactcaataatgttatactgtcttcagggttttatctagaaaaaatcctttttactatctatatgtgtatcaaaatcgttatttacatcatatatatatacacaataatatttttaaaacaaagattcatgctaataaaatgtagaactaccacagaaaatttcttaaattataaagattattttgactat

SEQ ID NO: 5356 - DNA, 273 bp, Protomyxzoa rheumatica
cactcgactccacttcactccattgtattccatcccattgcattcaactccactccattccactcctttcttttaacagtatctcaccctgtcgacaagcctggagtgaagtggcacaatctcagctcacatgacatttcaacattccattccactccattccattccatttcactacactctgctgcactccactccactccattccaatcaatcccactccattccagtacactgcattccactccactcacttccactccctttcatgcc

SEQ ID NO: 5357 - DNA, 167 bp, Protomyxzoa rheumatica
tcatctcacagtgttgaacctttcttttgattgagcagtttggaaaatccctttaggagaatctgaaagtggatatttggatggctttggggcctattttggaaaagcaaatttcttcacataaaaactacccagaagcattctgagaaacttatttgtgatgtgtg

SEQ ID NO: 5358 - DNA, 144 bp, Protomyxzoa rheumatica
gaatgaggaggccatttgaaatttgagttttggccaagcctacttcccttttacccagaaaagactacttaccatagctagttaatgagcttagagaagtcctttaggttggatcttttgtggtcactcttggacatgaatggg

SEQ ID NO: 5359 - DNA, 143 bp, Protomyxzoa rheumatica
tctacggataaaaatagaaagaaactttttgagaaactgctttgtgtcgtgtgcatttatctcacagaattaaacctttccttttactgagctgtttggaaacgctgtttggaaacactgttttcgcaaaatctgtgaaatga

SEQ ID NO: 5360 - DNA, 190 bp, Protomyxzoa rheumatica
attccattccattccattacattacattacatcctgtccagtccattctagtcctttgcattccattgcattctattctgcttcactccactactctctacacctttccattccaatccactacaatcctttccattctactcctctccactacactccttttatctccattcctttctattcctttcca

SEQ ID NO: 5361 - DNA, 127 bp, Protomyxzoa rheumatica
tcgaatggaatcatcaaaaggaatcgaatggaataatcgattagatgcgaatggaatcatcatcaaatggaataggttggaatcaaagaagggactcaaatggaatcatcgaatggacaagaatgga

SEQ ID NO: 5362 - DNA, 137 bp, Protomyxzoa rheumatica
aaattcagaccaaagcaggagtgttctagaatcctatgtgatggagaacaattcagaacctcgtagaattgttctggaatcctatgtgatggataaacatacagaccacatcatcagtgttctggaatcctaagtgt

SEQ ID NO: 5363 - DNA, 267 bp, Protomyxzoa rheumatica
ttcattcaatgatgtcacgttttggccttttggatggccaagtttgaggtatccaccaggaattttgttgctattgtatcctgatggcatcagtgtaatttgaataaatgaagtcaacccagaatcatagggtatcccaaatgattgtcaggagagtggagattacatctaagcatgcccttatctgggtaattaccagaggtgcctaccagaggtgccctggcatttagggtagaatttgtactgtcagagacttctaaccaccaa

SEQ ID NO: 5364 - DNA, 145 bp, Protomyxzoa rheumatica
tatccacaagcagattctacaaaagcagtgtttcaaaattgctctttcaaaagaaaggttcaactctgtgaattaaacagacacatcacaaagttttttctgagaatgcttctgtctagtttttatgtgaaggtaactccttttc

SEQ ID NO: 5365 - DNA, 142 bp, Protomyxzoa rheumatica
caactcacagagttgaagatttgttttgattgaggagttttgaatcactctttttgaagtatctgaaaatagataattgggacagtttgagccctgtggtggataaggaaatatcatctaataaattctagacagaatcatt

SEQ ID NO: 5366 - DNA, 238 bp, Protomyxzoa rheumatica
gaatattcagagcgctttggggcctacagtagaaaaggaaatatcttcatataaaatctagacagtagcaatctgaggaactcatttgtgaagtgtgcattcatctcacagagttaaatatttcttttgattgaggaattttgaaactctctttttgtagaatctgaaattgcatattttgagcgctttgaggcctatagtgggaaaggaaatatcttcacataaaaactagacagaa

SEQ ID NO: 5367 - DNA, 280 bp, Protomyxzoa rheumatica
tacaacggaatcagggacagtgcgcgtcgctagaagaagaggtagagctgtgcataactcgctgggcttgctggaaaatgtaatctcatgaacactccttaatgaacagtgcgcctcactggaggaaaaggcggggctgtgcaggccttgctttagttgctgagagatgcggtctcataaacactcccagccctttggtcacagggctgaaggactacatttccatcatgcaccgggatcagggatagtgcgtgtgcctggatgaagaggcaaagctttg

SEQ ID NO: 5368 - DNA, 262 bp, Protomyxzoa rheumatica
cataggccttaatggactcccaaatatccctttgcagatactataataagagtatttccaatctgctgaatcaaaagaatggtttacctctgtgagttgaatccacactacacaaagcagtttcacagatagtttctttctagtttttatctgcatatattctgtttttcttcataggcctaaatgggctctaaaatgtcccttggcggattctttaaatagagtgtttccaacctgttggatcaaaaggaatttttaactc

SEQ ID NO: 5369 - DNA, 184 bp, Protomyxzoa rheumatica
gggactggcactgaattgagtggaatggagtggagcggaagggagttgaatggaatagaatggaatgacatgggtgcagagattgtgccaatttgctacagcctgtgtgacagagggagaccctgtcaaaagaaaggagtggaatgggatagattgcaaaggcgtggagtggaatggagtggag

SEQ ID NO: 5370 - DNA, 140 bp, Protomyxzoa rheumatica
ccaaatatccacttgcagattctgcaaaaagactgtttcaaaactgctcaataaaaagaaatgttcaactatgtgtgatcaacgcactcatcacaaattactttctctgagtgcttctgtgtagtttttatttgaagata

SEQ ID NO: 5371 - DNA, 274 bp, Protomyxzoa rheumatica
gaattttgtccctcacaaaggattcctgaagactcctgctttggtctgaatgtttgtccctcacttatgattccagaacactgctacatgtgtctaaatgtttgtccctcacataggattccagaatattcctgctgtggtctgaatgtttctctctcacataggattccagaacaatgttgctggggtctggaattttctccctcacataggattccagaacactgctacgagagtctaaatgattgtaccacacgtagcactccagaacact

SEQ ID NO: 5372 - DNA, 128 bp, Protomyxzoa rheumatica
aggagacaccttcatataaaaactagaaagcagctttctgagaaactcctttgtgatgtgtgcatgcatctcacagagctgaacgtttcttttgatggtgcacattggaaggagtcttttttttagta

SEQ ID NO: 5373 - DNA, 142 bp, Protomyxzoa rheumatica
tgaagaaatatgtcacaaagctcctgcaggcagagcctagccaagagtttcatctcctgagtgatcagtgcaacgatatgtcacaaagtcccatgtagacaaatcccagaaaattgttaaatcacctgggtgaccagtggag

SEQ ID NO: 5374 - DNA, 152 bp, Protomyxzoa rheumatica
gattccatacgaatctgtttgatgattccattcaattcccttcgatgattccgttcgttccctttctataattccattcgattccattcgatgatgactccattttgttctatttgataatgattccattcggttccatatgatgatgattc

SEQ ID NO: 5375 - DNA, 173 bp, Protomyxzoa rheumatica
tccattacatttgggtccattccattccaatcgatgccattccattagattctattccgttcgtgtccattacattaaattccattccattcttttggatgtcattccattcgattccattcctttcgagtgcattccatcccattccattccatctgcttccattccattct

SEQ ID NO: 5376 - DNA, 136 bp, Protomyxzoa rheumatica
tcaaagggctcacaaatatccctttgtagattttacaaaatgactgtttccaaactgcttaatcaaaagaaacgttcaaccctgtgaggtcaatgcacatatcaggtagaagtttctcagaatgcttctgtctagt

SEQ ID NO: 5377 - DNA, 138 bp, Protomyxzoa rheumatica
caaagtgctaggattacaggcatgagccatggcacccagcgttttatgttgttgtttgtttgtttgtttgtttttaggctacaccattcttggagtaaatataggtaactaaaaacaattacaaaaaaagtatttatt

SEQ ID NO: 5378 - DNA, 148 bp, Protomyxzoa rheumatica
tcacataggattccagaacactgccacgaggttctgaatgtttctacttcacattggattccagcacaccgctgttggggtcttaatgtttgcaccttacatagttttgcaaaacactcctatgaggttcccaatgtttgtttcccac

SEQ ID NO: 5379 - DNA, 151 bp, Protomyxzoa rheumatica
tttgaacaagaggagaaaattcaggtaattcattttgattgatcaagcaaaataatttgcagctgaacattatagaagcaacaaaaattcttatgatattggggtataggaaacaggctcaagaaagcacagtatttcctgtttcttttca

SEQ ID NO: 5380 - DNA, 242 bp, Protomyxzoa rheumatica
acggtggaaaagcaaatatcgtccgatacaatctagacagaagcattctcagaaagttctttgtgatgtgtgcattccactcatatagttgaccctttcttttgataaagcagttttgaaacactctttttgttgcatctaaaagtggatatttgcatccctgtaaggcctctggaagaaaaggcaatttctttatataaaaactagaaagaaggattctcagaatctagtttctgatgtgt

SEQ ID NO: 5381 - DNA, 128 bp, Protomyxzoa rheumatica
acaacacctgacagaatgaaaggaaaataaaaaggctggacaagatatatggtggagttatgcatatacgaagagctgggaaaaaggaaagataattttatgaggaagaggatttgtttgtgtctctc

SEQ ID NO: 5382 - DNA, 136 bp, Protomyxzoa rheumatica
aaattgctagagctcatcaaaatagaggcacacctcactttatcgagcttcactttatttagcttggaaacatcacctttttaacaaattaaagatttgtggccacaaagtgctcagtaagtctgatcaacaccat

SEQ ID NO: 5383 - DNA, 129 bp, Protomyxzoa rheumatica
gaatccattcgatgattccattcaattaccatcgatgattctgttcgatcccattctacgattcccttcgattccattcgatgatctttccatttgatgtagttcagtgattccattggattccattcg

SEQ ID NO: 5384 - DNA, 184 bp, Protomyxzoa rheumatica
agaatgtgcaagtggatatttggagctctttgtggcctatggtagaaaaggaaatatcttcacataaaaattacaaagaagcattctgatagacatgtttgtgttgagtgcattcagctcacagaattgaacctatgttttgattgagcaggtttgaaacactctttgtagaatctgcaagtgg

SEQ ID NO: 5385 - DNA, 166 bp, Protomyxzoa rheumatica
ccactcaattctattgcactacattccattccattccattccactccattcaacttcaatccactccagtcaaatctactccacaccattcaattccattcaaccacaatccactccattccattagattcctttccattccattccactgcactctgatacactt

SEQ ID NO: 5386 - DNA, 213 bp, Protomyxzoa rheumatica
aacacagtttgaaaaacacttgggagctccttgaggccagtggcgaaaaagtgtatatcccaggataaaaactagaagaaatatatctgagaaactgcttggtgatgtgagcattcatcttgaagaaataaacctttcttagaaactgctttgcaattagtgcattcatctcaaagagtgaaaattttctctcattcagcagtttggaaacac

SEQ ID NO: 5387 - DNA, 178 bp, Protomyxzoa rheumatica
ccttgttttcaccgtatgtgacacctccactagaaattctgcttttctctgcactccagcctgggtgacagagcgaggcttcctcaaaaaggaaaaaagaaaaagaaaaagagagaaagaaagacagaaggaagtaaggaagaagaaagaaagaaaaagaaagaaagaaagaaagaga

SEQ ID NO: 5388 - DNA, 379 bp, Protomyxzoa rheumatica
attccagttcattgcattcgtggccattcgatttgattccattccattagattccattccgtatgattccattcctttcgattacattcaattggagtccaatccatttaagtcagttactttcaagtcgattctattcattggagaacattcgattccattccatttgtttatattcgaatccattcaattcaattcaattcaatttgattccattcctttccagaccattccattcttgtccattccttttgagtccattcgattcccctttattcgattcaatcccatgcgattccagtcctttcaattgcattcaattagactacattccattggagaccattatatttgagtccatagcattagagaccattcg

SEQ ID NO: 5389 - DNA, 151 bp, Protomyxzoa rheumatica
tccaagtggatatttagagcagttagaggtgtgtggtggaaaaggaaatatcttcatagaaaaactaggtagaatcattcttagaaactattttgtgatgtgtgaattcagcttagagagtttaacctttcttttgatagtgaattttgga

SEQ ID NO: 5390 - DNA, 199 bp, Protomyxzoa rheumatica
tgcttagaaacttctttgtgatgtgtgcactcatctcacacagttgaaccattcttttgattgagcagtttggaaaaattctttcagtagaaatgcaagtgaatatttggagcccttggagccgtattgtataaaagtaaataccttcacttaaaaactacacagaatcattctgagaaagttctttgtgatgtgtgca

SEQ ID NO: 5391 - DNA, 130 bp, Protomyxzoa rheumatica
aacaaacacaacaattcattttcaacaggcaccagttcctcctaaatatggaagattcaccatgtcttagtttggattcccccaggagcagaacttaagacaaagatttcagtgcatgtagtttatttgg

SEQ ID NO: 5392 - DNA, 122 bp, Protomyxzoa rheumatica
gttaggtgtgaaattagcttagcaagttagactcccaggacaattccacacttcactaagcaaatgatggctattcttaactgacaacatcatcaccagctgtctcttactaaccctaacag

SEQ ID NO: 5393 - DNA, 280 bp, Protomyxzoa rheumatica
aattttaacgctttgagatgaatgcacacatcacaaatcggtttctcagatagcttccttttagtttttatcatgggatacttgtttttttgccattggcctcaacgagctcccaaatatccaatcacagaatggacaaaaacagtgtttccaaactgctgaatcaaaagaaagatttcacattgtgagatgaatgcacacatcacaaagtggattctcaggtagcttgcttctagtttttatcctttgatattcactttttcaccattggcctcaatga

SEQ ID NO: 5394 - DNA, 367 bp, Protomyxzoa rheumatica
acataaactatcaaatacacaaagtatgtattatatactgtacataaaatagaaaagttcccaaaatatgtattatatatattataaatatgtacataaaatatgaaagtatccaaccatttataataaactctacataaaacaccaaagtactcaaactgggtattatatactgtccctaaaatatcaaagtacccaaaatatatattgtaaactgtacataaaataccaaagtacccaaactgtgtattttatactgtccataaaatatcaaagtacccaaaatatatattataaactgtacataaaatatcaaggtagccaaaatatatattgtatactgtacataaaatataaaagtacccca

SEQ ID NO: 5395 - DNA, 290 bp, Protomyxzoa rheumatica
tggagtggagtggagtggagtggaatggaattgaatggcatggattgcaacggaatggaatggcgaaatgaaatgaaatgtgagctgagattgtgccactacactctagcctgggtgacagagtgagatcctgttgaaagaaaggaaagtaatgttatggagtgtactggaattgaatggaatggaatgtagtggagtggagtggagcggaaaggagtggaatgcaatgtgatgcaatggaaaggatcggagtggagtggagtgcagtggtgttgagtggaatggaatgg

SEQ ID NO: 5396 - DNA, 171 bp, Protomyxzoa rheumatica
ggaatagaatggaatggaatggaatggaatggaagggaatcaacctgagtggaatggaatggaatagaatggagtggaatgtaatataatggattagaatggaatttaattgaatgtaatcaaaacgagtgtaatggaaaggaatggaatggaatggaatcaacccaagtg

SEQ ID NO: 5397 - DNA, 129 bp, Protomyxzoa rheumatica
atattcatgggaagatgttcctcccagtcccttctggagaactgtccaaccacacagtactaatttcatgcaacttaaatggcccagacatttagcttacctctctcatttatattatggtacaaatct

SEQ ID NO: 5398 - DNA, 172 bp, Protomyxzoa rheumatica
tactgagaattcttctgtcaagcaatataagaagaaatcccgttgccaaagaagggctcaaagaggtccaaatatccacttgcacaccttacaaacagagtatttccgaactgctctatgaaaagaaaatttaaactctgtgagttgaatgcacacatcaaaaaatagtttc

SEQ ID NO: 5399 - DNA, 166 bp, Protomyxzoa rheumatica
gagaaccttcctttgaatgtgtgcattcatctcacagtgttgaaccttttttttgattcagcagcttctaaacattaatttttcaaatatgcaaaggaatatttgtgagcccattgatgcttctgaggaaataggaaatatcttcacataaaaactagacagaatc

SEQ ID NO: 5400 - DNA, 176 bp, Protomyxzoa rheumatica
ccattccattccattccactccagtccactccactccactccattccactcctctccactccactgtactccaacctattccacgcctatcttttgacaggatctgcctctgtcacacaggctgtagtgcagtagcacaatctcaacacctattgcattccttttcattccattcc

SEQ ID NO: 5401 - DNA, 269 bp, Protomyxzoa rheumatica
tagatttgcctggtagtatggctgatgcctgtaatccccatgctttgggaggccaaagcagaagggttgcttgagcacaggagtctaacaccagcctgagcaatgtagcaagactctgtctctaatttaaaaatatacatatttttaaaacattttataatgaaatctcttcaatttatgcttcagtagtctcaacttctctcttactgtacctttgcacagtgtcatgagatacatgtttctgatcttctaggtcactgtttcagttt

SEQ ID NO: 5402 - DNA, 300 bp, Protomyxzoa rheumatica
gtctaggctctgccaatggtggcattgtgacttatctctgcactgatcaccgaggagatgtgactattgactaagctctgaatagaggtacattgggacatatctctgcactgatcgctgaggtgatataaaacttgtctaggctttgcctatggtttgatttatgacatatctctgcactgatcaaccaggtgatgtaactcttgtctaggctctttctacagggattttgtgacatatcactgcacgaatcacctagatgatgtaagccttgtatgggctttgcctacagaaggcttt

SEQ ID NO: 5403 - DNA, 133 bp, Protomyxzoa rheumatica
gttcaacattccttttgatagagcagttttgaaccacttttttgcagaatctgcagttggaaatttggacctctttgttgccttcgtttgaaacgtgattccttcatatgaaactagagagaagaattctcag

SEQ ID NO: 5404 - DNA, 203 bp, Protomyxzoa rheumatica
agctatctgagatagctctttgtgatgtgtgcattgatctcacagaattaaatatttcttttcattcagcagtttggaaacactgtttttggagaatctgcgaagggatatttgtgagtgccttcaggtctacagtgaaaaaggaaatatcttcagataaaaaccagaaagacactttcagagaaactcctttgtgatatgtg

SEQ ID NO: 5405 - DNA, 300 bp, Protomyxzoa rheumatica
ccttatagtttttattcagggatattcactttttggcatttggccccaaggaggtctgaaatgtctatctgcagaatggacaaaaactctgcctccaaactactgaatccaaaggacgctttaactctgtgagatgaatgcccacatcacaaagcactttctcagaaagcttctttctcgtttttatctgaagatatttcctatttcaccataggccacaatactctctgagaaaaccttttgcagattctacaaaaccagtaatttctaactgctgaatgaaaagaaaggtttaactat

SEQ ID NO: 5406 - DNA, 154 bp, Protomyxzoa rheumatica
ggagtgttcttttatcctacgtgagggacagagattaataccctcttagcagtgttctgtaatcctatatgaggtacaaactttcagacaacaacagcagtattctggaatcctacgtgagggacaaacattcagaccacaggaggagtgttct

SEQ ID NO: 5407 - DNA, 226 bp, Protomyxzoa rheumatica
aggattccagaacactcctgctgtagtctgaatgtttctccttcagataggattccagaacactgctgatgggttctgagagttggtccctcaccgacgattccagaacactgctacgtgggtctaaatgtttgtccattacttaggattccagaacacgggtacgagggtctgaaactttgcccattacataggatacgagaacactcctacgaggttctgaatt

SEQ ID NO: 5408 - DNA, 199 bp, Protomyxzoa rheumatica
tccattccattccgttccattccactcggttttaatcaattccattctattccattccattgcttttcaattcctctccactccactcaactccattcaattatatttcttctctttccattccactccattcaaaaccagtgcactccactgcattcaattccattccacccctctgttctccacttcaccacattcc

SEQ ID NO: 5409 - DNA, 134 bp, Protomyxzoa rheumatica
ggatacttttgagccctttgaggactatggtgaaatagaaaatatcctcatatgaaaactatatagaaactttttgagaaacttctttgtgatgttttcattcatcggatagaattgaaccttactattcatag

SEQ ID NO: 5410 - DNA, 150 bp, Protomyxzoa rheumatica
caaagaagtgaggctgggagtactgtgtgaggtggtcttggtgctggcaatcgccaaagtgaacctgggagtactgtgtaaggttgtcttggtggtggcgatcgcaaaggtgaatctgggaggactggttgaggtggtcttggaggtggc

SEQ ID NO: 5411 - DNA, 139 bp, Protomyxzoa rheumatica
ggacccaaatgtaatggactcaaatggaatggactcaaatagaatggactcaaactgaatggactcaaaaggaatggtctcaattggaatttattagaatagaatggaattgaacggattgcaatagtatggaatggaa

SEQ ID NO: 5412 - DNA, 144 bp, Protomyxzoa rheumatica
cacagagatgaatctttcttttcattgagcagtttggaaagaatctttttatacaaagtgcaaagggatatttctgagtgctttgaggcctatagtgaaacaataatatcttcacatataaactagacagaagcattctgagaa

SEQ ID NO: 5413 - DNA, 159 bp, Protomyxzoa rheumatica
gaatggaatcattaaatggacacgaatggaatcatcgtggaatggaatcgaatggaatcatcgaatggcattgaatggattcatcattgaatggaatctactgaaatcatagaatggacacgaatggaatcacccaatggaattgagtggaatcatcat

SEQ ID NO: 5414 - DNA, 142 bp, Protomyxzoa rheumatica
cctccttgaggccttcattggaaacgggatttcttcatatagtgctggacagaagaattcaccgtaacttctttctgttgtgggtattcacctcacagaattgaaccttcttttagacagagcagatttgaaacactgtttt

SEQ ID NO: 5415 - DNA, 127 bp, Protomyxzoa rheumatica
gggacattgtgacatatctctgcactgatcacacaaatgatgcaaatcttctcttggctctgcagggatggggtattgtgacatatttctgaacagatcatccaggagatgtaactattctccaggc

SEQ ID NO: 5416 - DNA, 254 bp, Protomyxzoa rheumatica
gagcagttttgaaacactctttttgtagaatctgcaagtgtacatttggggcgctttaaggcctttattggaaaaggaaatatcttcttataaaaactatacagaagcattcggacaaaatttgtgacgtgcgttttcatctcacagagttaaaactttcttttgattcagcagtttttaaacaccctttttgtaggatctgctaggggacatttggagcgatttgaggcctatggtggaaaaggaattatctt

SEQ ID NO: 5417 - DNA, 126 bp, Protomyxzoa rheumatica
gaatggagaaaaactgtgtttccaaactgctgaatccaaaaaaaggtttaaatctgtgagatgaattgcacacatcacaaatctctttctcagatagcttccttctagtttttaccctgcgatatt

SEQ ID NO: 5418 - DNA, 210 bp, Protomyxzoa rheumatica
tgtagaatctgcaagtggacatttggagcacttttaggcctaaggtggaaaaggaaatatcttcaaacaaaaagtagacagaagcattctgacaaactttttcgtgatgtgtgctttcatctcacagagttgaaacttacttttcattgtgcacttttcattgttcaggcctaaggtggaaaaggaaatatcttcacataaaaactacgt

SEQ ID NO: 5419 - DNA, 142 bp, Protomyxzoa rheumatica
ccattccattcaattccgttccattcgagtctattgcattccattgcattctatttgggtccattccactgcattccatttgattcgactcaatttcattcaattccattctattccactcaactcgattccattccattcc

SEQ ID NO: 5420 - DNA, 184 bp, Protomyxzoa rheumatica
agaagctatgtgtgaaactgatgcgacgtgtggattcatttcacagagttaagcctttcttttggttcagcaggttggaaacactttttggaaaatttgtgaatggacaattggcaacccattgaggtctatgggacaaaacaaagtatacccagataaaaactagaaagaaattatctgtgaa

SEQ ID NO: 5421 - DNA, 253 bp, Protomyxzoa rheumatica
agcaggttggaaatgctctttttggagattgtgcaaagggacacttgggagccctttgaagcctgtgagtaaaaactgaatatccccagataaaaactagaaagaagctatgtgtaaaactgcctggtgatgtctggattcatctcacagagttgaaactttcttttcattcaccaggttggaaacactcttcttgaagtatttgtgaagggacacttgggaccccattgaggtctatggggaaaaacagaat

SEQ ID NO: 5422 - DNA, 174 bp, Protomyxzoa rheumatica
aagtgctgaattaaaagaaaccttcaactctgtcagatgaatggaggcatcacaacgaagttcctcagaatgcttctgtctagttgaaatgtgaagacatttctttttcaccatagacctcaaagggctcagagttagacctttgcagattgcagagaaagactgtctctaaac

SEQ ID NO: 5423 - DNA, 126 bp, Protomyxzoa rheumatica
tattctatttgattccattcgataatgattcccttctattccattcgatgactcaatttgattctatttgaacatgattctgttctattccatttgatgatgattctattcgattccattcaatga

SEQ ID NO: 5424 - DNA, 142 bp, Protomyxzoa rheumatica
cggtttggaaactggcaaggagagcgaaggcatcatgccagacttccacccttccctgcatgtttcccagtgcccacagagctccgggagcaaacggtcagccttacacatctctgaactgatcaacaaagtgatgtaacac

SEQ ID NO: 5425 - DNA, 131 bp, Protomyxzoa rheumatica
caaaacattttcatagatagcttctttctaatttttatgtggggatattcaatttttccccataggcttcaaaggtctcacaaatctccttttgcagagtctccaaaaggagtgcttccaatttgctgagg

SEQ ID NO: 5426 - DNA, 125 bp, Protomyxzoa rheumatica
aatgattctgtctagtttttctatgaaggtatttccttttctatcataggctgaaacatctccaaatatccacctggaaattctacacaaagagaatttgtaaactgctctatagaaaggaaggt

SEQ ID NO: 5427 - DNA, 157 bp, Protomyxzoa rheumatica
tgcagattctacagaaagagtgtttcaaagctcctcaatcaaaagaaagcttcaactctatgagtcgatgtctgatgcacacatcacaaagaaggttctcagaatgcttctgtgtagtttttatgtggatatatttcctcttccaccttaggccaca

SEQ ID NO: 5428 - DNA, 140 bp, Protomyxzoa rheumatica
tggaatggaatggaatggaatgcaatggaattgaacggaatataaaggaattcaacggattcatcccgagtggaatggagtggtatctaatgctatggactggaatggaacagaacggaatggaatggaaagaatagatt

SEQ ID NO: 5429 - DNA, 228 bp, Protomyxzoa rheumatica
ctcgagtccattgcatttcattccaatcatttggagtccattccttgctttctattcctttcgaggccattccattccattccattccattccatgtgagtcaattccattccattccattcgataccatttctttgcattccactcctttagagtccattgaattctattccgtttgaatccattccattccattagattagtttccattccattagtgtccattcc

SEQ ID NO: 5430 - DNA, 154 bp, Protomyxzoa rheumatica
atagaatcatcatcgaatggagtcaaatggaatcattgaatggaaccaaatgaaatcatcatagaatggatccgaatggaatcatctttgaatgggattggatggaatcattgaatggactcgaatagaatcatcatcgaatggaatcgaatgg

SEQ ID NO: 5431 - DNA, 124 bp, Protomyxzoa rheumatica
aaaatatccacttgcagaccctctaaaagagtgtttcagagttgctcaatcaaaggaaaggatcaactctgtgtgacgaatgcactcatcacaaagaagtttgtctgaatgcttctgtgtagaa

SEQ ID NO: 5432 - DNA, 321 bp, Protomyxzoa rheumatica
ccactccactccagtccattccactccactcctttccattccatcccatttcattccactcctttccactccacaccaatcctccccactccattccattccactcctttcctttccattcctttcttttgacaggatctcactctgtcaccaaggcttgtgtgcagtggcacaatctcatctcatattttacttcaccatttcattccattccattctattacactgcactccactctactccactgaattctactccactccactccaatcgattcgattccattccattccaatcccttccattccactcctttcttt

SEQ ID NO: 5433 - DNA, 207 bp, Protomyxzoa rheumatica
gagatgaatgcacacatcacaaagaagtttctcagaatacttctgtttgttttttatgtgaaggcatttccttttccacaataggccacaaaaggctagaaatatccacttgcagataatagaaaaagacagtttcaaaatggctcaatcaaaagataggttcgaatctgtgagttgaatgcacacatcacaaaggaatttctcaga

SEQ ID NO: 5434 - DNA, 130 bp, Protomyxzoa rheumatica
tgcttgttcatatgttgcatgtctcgttagcatcttagatctccacccaggagtgtatttctgtttgtttgtttgtttgagacagagtctccccgtgttacccaggctggagtgcagtggtgtgatctct

SEQ ID NO: 5435 - DNA, 231 bp, Protomyxzoa rheumatica
atttggtgtactttgatattttatgcacagtaccgaatatatatttggtgaactttgatatattgtgtacagtatagaatatattgttggggcagtttgatattttatgtacagtgtataatatatattttgtgtcctttgatgttttatgtacactacataatatatatattgtgtaatttgatattttacttacagtatattgtttatattttgtgtattttgatattt

SEQ ID NO: 5436 - DNA, 183 bp, Protomyxzoa rheumatica
cattccattggagtccattccattcccttccattcgattccaatccattccagtcaattccattccattcctttcaattcctttctagtccattacattccattacattgctttcgagtccgttccattccattccataccgtttgtgtccgttctattccattacattccattgcattaaat

SEQ ID NO: 5437 - DNA, 128 bp, Protomyxzoa rheumatica
atatttcctttaccaccataggcctgaaagccctccaaatgaacagttgcagattctagaaaaggagtgtttctaaactgctccatcaagcgaaatgttcaacactgtgagttgaatgcacacatcac

SEQ ID NO: 5438 - DNA, 230 bp, Protomyxzoa rheumatica
tccattccatcccattccattgcattccattcgaatccactccactccactccacttggttcaattctattctttcctattccataactttccactccattccactccactccattccattcaattccatttcaccccactgcattccaatccattctactccactgcactctgcttcaccgcattccattcgaatccatttgtttccatttgatttcattccgtttgat

SEQ ID NO: 5439 - DNA, 158 bp, Protomyxzoa rheumatica
tctactaaaagagtctttccaaactgttcaaccaaaggaaaggttaaactatgtgaaatgaatgctcacatcactaagaagtttctaagattgcttctgtctacattttatgtgaagatatttctttttctaccaaaggcgtcaaagtgcacaaaata

SEQ ID NO: 5440 - DNA, 122 bp, Protomyxzoa rheumatica
ctctgtgagatgaatgtacacatcacaaagaaatttctcaatatgcttctgtgcagtttttatgtgaagatatatgcttttccaccgtaggcctccaggggctccgtatatgcacttacaga

SEQ ID NO: 5441 - DNA, 159 bp, Protomyxzoa rheumatica
gcccacccactaaattatccttaaaaactctgatccccgcatgctcagggagcctgatttgaacaataacaaaactccagtctcctgcacagtcagctctgtgtgaattactctctctatcgcaattcctgtgtcttaataaatcagttctgtctaggc

SEQ ID NO: 5442 - DNA, 130 bp, Protomyxzoa rheumatica
ccattccactccattccattcgaatgtatttcgttgcaatgcattccgtttgaatctattccatttgagtatattcaattcaaatgcattccattggagtccatttattccattaccttccattccattc

SEQ ID NO: 5443 - DNA, 195 bp, Protomyxzoa rheumatica
tgttagctgtgtctttttgttttgttttgttttttgtatagcattatgttgaggtgttttctttctttttatagtttattaactatattttatcatgaatgtgggttaaattttgacaaatgctttttcttctttgcttaagatgattacatgagggttttttccttatgttaatgtgatattatgctgattttc

SEQ ID NO: 5444 - DNA, 124 bp, Protomyxzoa rheumatica
atcatcattgaatggaatcaaatgaaatcatccacgaatggaatcgaacggaaccatcgaatggaaactaatggaatcatcatccaatggaaccaaatgcaatcatcatcaaatgaaacctaat

SEQ ID NO: 5445 - DNA, 156 bp, Protomyxzoa rheumatica
cagcaggagtgttcaggaatcctatgtgagggactaacatttagataatcaaagccgtgttctggaatcctatgtgagaggcaaacattcatacaatcatagcagtgttctgcaatcctatgttagggacaaatattcagatcatcctagcagtgt

SEQ ID NO: 5446 - DNA, 166 bp, Protomyxzoa rheumatica
atgtgcataaacagaatggacaaaaacagtgtttccaaactgatgaatcaaaagaaaggtttagctctgtgagacgaatgcacacatcaaaaagcatttcttagaaagcttctttctagtatttatctgaagatattttctttttcaccataggactaaatgttct

SEQ ID NO: 5447 - DNA, 286 bp, Protomyxzoa rheumatica
caccaccaccgagaccccctcaagcagtactcccagcttcacttcttcgatcaccaccaccgactcgatcgtcaccaccgagaccacatcccacagtactcccagcttcacttcttcaatcagcaccactgagaccacatcccacagtactcccagcttcacttctttgatcaccaccacggagaccacctcacacagtactcccagcttcatttctttgataaccacctctgagaccccctcacacagtactcccagcttcacttcttcgatcaccaccaccgag

SEQ ID NO: 5448 - DNA, 225 bp, Protomyxzoa rheumatica
acttatcacccttgggagggaactcttgtctacgctctgcctacaggaggctttactacttatacctgcacttataacctaggtgatgtaacgcttgtctagactctgtctacacgggaattctcacatatctctgcactgatcacccgggtggttactcctgtctaggttcatcctacaggagtgttttgacatatctctgcactgatcacccaggtgatgtaa

SEQ ID NO: 5449 - DNA, 123 bp, Protomyxzoa rheumatica
atcattgaatggaatcgaatggaataatcatcgaatgtaattgaatgtaattatcattgaaaggaattgaatggattcatcatctaatggaaccagagtcatcatcaaatggaattgcatgga

SEQ ID NO: 5450 - DNA, 243 bp, Protomyxzoa rheumatica
acccaacaagagaatatagaacgcgccacccaacaagagaatatagaacacactacccaacaacagaatatagaacactacaccaacaacagaatatacaacacgccacccaacaacagaatatacaacacgccacccaacaacagcagaacactccacccaacagaagatagaacactccacccaacaatagtagaacactccaaccaacagaatacagaacactccaccaacaacagaata

SEQ ID NO: 5451 - DNA, 172 bp, Protomyxzoa rheumatica
ccattgcagttcattcttttgagtgcattctattccatttcattttagtcgattctattctattccattcctttcgacaccactccattccattcgatttcattccattcaattccattaccttctatttcattcagttcgattccattccattccactgcattccattcca

SEQ ID NO: 5452 - DNA, 131 bp, Protomyxzoa rheumatica
actctgtgacatgaatgcacatattacaaagaagtttctcagaacgattctgtctggtttttatgtgagaatatttccttttccaccataggcctcgaactcctccaaatatccagttgcagattctacaa

SEQ ID NO: 5453 - DNA, 135 bp, Protomyxzoa rheumatica
tcaatgattccattcaattccattctatgataattccatttgagtccaaccaatgattccattcatttccattcaatgattccattcgagtccatttgatcattccggtagggtccattcgatgttgattccatt

SEQ ID NO: 5454 - DNA, 311 bp, Protomyxzoa rheumatica
ctggaaaggaatggaaaggagtagtgtggaatggagtggaatgcagtggagtggagtggacgggaatggagtttagtggtgtggagtggagtaaagtggagtggagtggaatggaatgcagtggaatggaatggagtacaatggaatggaatgaaatggaatgggtgctgagattgtgccactgtgctacagactgtgtgacagagagagatcctgttgaaagaatggtgtggaaggggatggagtggatttgagtggagtggaggggaatggagtggaatggagtggagaggattggaatagagtggagt

SEQ ID NO: 5455 - DNA, 213 bp, Protomyxzoa rheumatica
tgaatgattctcccttacataggattccagaagactgctgctgatttctgtgtttttctctctcacataggataccacagcactgctacgaggatctgaatgattgttcctcacataagattccagaacactcctgctctgatctaaatgtttatccctcagatgggattccagaacactgctgctgtggtcagaatctttgttcctcacata

SEQ ID NO: 5456 - DNA, 123 bp, Protomyxzoa rheumatica
ggcaatatcttcatagaaaaactagacagaatgattctcatgaactgctttgtgatgtgtgcgttcaacccaccgactttaaaatttattttgatagaatagttttgaaatactctttttgta

SEQ ID NO: 5457 - DNA, 291 bp, Protomyxzoa rheumatica
aaagagagagtttaaaaactgctcaatcaaaagaaagattaaacagtgtgagatgaaggtacacaacacaaagaagtttctcagattgcttctgtctagattttatgagaagatattttcttttctactacaggccacaaactgtccaaatttcccctgcagattctacaaaaagtgtttccaaactgctcaatcaaaagaaagtttcaaatcagtgaggtgaaagcgcatatcacaaagaaatttttcagaattcttctgtcttgtttttatgtgaagatatttcctgtt

SEQ ID NO: 5458 - DNA, 139 bp, Protomyxzoa rheumatica
atgatgattccattctagtccattcaatgattcctttctagtccactcagtgatgattccattcgatttcattcaatgattccattcgattccttttgatgattatttcattcgagtccattcggtgattactttcgat

SEQ ID NO: 5459 - DNA, 172 bp, Protomyxzoa rheumatica
ggattccagaacactgctacaagggtctgaatgtttgtccctcagataggatttcagaacacttctacgattgtctgattgttggtccctcacatcggattccagaacactgcgacgagggtctgaatatttgttcctcacaggggattccaaaacactcctgctgtgttct

SEQ ID NO: 5460 - DNA, 376 bp, Protomyxzoa rheumatica
tatgtatgggacaaacactcagactttcgtagcagtgttctggaatcctacgtgagggacaaacattcagaacctagaagcagtgttctagaatcctatatgagggacaaacgttcaaacaacagcgggagtgttctggagtcctatgttatggacaaacattcagaccctagcagaagtgttctggaatcccatgtgacagacaaacactcaaacaagagcgggagtggtctggaatcctaagttaggatcatacattcagacccccgttgcagtgttctggaattctatgtgtgggagaaacactcagaaccagcagcagtgttctggcatccaatgtgagggacacacgagtagactgcagcagcagtgttct

SEQ ID NO: 5461 - DNA, 171 bp, Protomyxzoa rheumatica
gaatggaatggggtggaatgtaattcaatggaatgaaatgtattagaatggaatggaattgaatggactagaatggaatgggttggaatgcaatggactcaattgcaatggaatgtaaaggacttaatcggaatagaatggattggaatggattcgaatagaatggaatgg

SEQ ID NO: 5462 - DNA, 158 bp, Protomyxzoa rheumatica
gttaatggagttcagagcaggggaatggaatggactggaatggaatggagtggaatggatggactcgagtggaatagactcgaatggaatgaacttgagttgaatggactcgagttgactggactagaatggaattgacttgagtggaatggacacga

SEQ ID NO: 5463 - DNA, 164 bp, Protomyxzoa rheumatica
tccattccattccattccactccattctattcgtttccactctggttgattccaatcctctccattccattcctttctactccattctattccattccattccattccattccactgtggttgattgcattccattcttatcctttccattgtattccattcta

SEQ ID NO: 5464 - DNA, 154 bp, Protomyxzoa rheumatica
aatataatggaacaaaatggaatcgaacggattgcaatcaaatggaacgagatggaatggaatggtctcaaacggaatggagtcgaatggaatagaataacatggaatgggattgaacggaataaaaagaatagaatggaatggattgtaatgg

SEQ ID NO: 5465 - DNA, 242 bp, Protomyxzoa rheumatica
ccattctattcgaataaattccattcgagaccattcctttcgattccattctgtttgtgtccattgcatttgatttcattcaatttgggtccataccattccattcctttccattccattccattcgatgcccttccattcgattctattccattcgagtccattccatctgagtccattccattccactccattccattcttgtccattccatttgagtccgttccaatccagtccattcc

SEQ ID NO: 5466 - DNA, 155 bp, Protomyxzoa rheumatica
cagcctcctggacctgcatacacagaaaaacttaaaggccatttccagtacagctgtgagtggcacctatctgtaccacattatgttgtacgtaactttttacaggtctttaggcaagaccagaacaactgcatcaagcacagcaggagagataa

SEQ ID NO: 5467 - DNA, 231 bp, Protomyxzoa rheumatica
aacccaatccactccactccatcccattccatccaattccattacattccacccctcgtccctccattccactcccctccacttcataccatttgattccatcccattccattccattccactccactccactccgctccgcttggctccactccattatattccaatctattccattccattccttacattcgatcggatctcactctgtcacccagtctggagtgcagt

SEQ ID NO: 5468 - DNA, 144 bp, Protomyxzoa rheumatica
tgatcagtggaaatgtatatcacaaagcccccggtaggcaaagcccagacaatagttacaacacctgggtgagcagtggagagatctgtctcaatgcccctttaggcagaggttagacaagggttacatcatctcggtgatcag

SEQ ID NO: 5469 - DNA, 147 bp, Protomyxzoa rheumatica
atgccacctttgggcagagggtagataagagttacatcacctaggtgatcagtgcagagatttgtaaaatttccctgtttacagtgcttataaaattgttacatcacctaagtggtcagtgcagagatatgtcacaaagctcctgta

SEQ ID NO: 5470 - DNA, 220 bp, Protomyxzoa rheumatica
cagaagcattctgagaaacttctttgtgatgggtgcattcttctcacaaggttgaaactacgttttgattgagcagttttgaatttctctttttgtagaatctgcaagtggatatttgaaaccctttgcatcctatggaggaaaaggaaatatcctgatacaaatactacacagaagcattctgagaatcttctttgtgatgtgtgcattcatctcacag

SEQ ID NO: 5471 - DNA, 136 bp, Protomyxzoa rheumatica
ccattccattcctttcaattcctttcaagtccattcaattccgttccgtaacatttgaatccattccgttccattagaatccattgcattaaatttgactccattctattccatttcattctagtccctttgattg

SEQ ID NO: 5472 - DNA, 236 bp, Protomyxzoa rheumatica
acattcagaccccaggagcagtgtcctggaatcttatgtgaggcacaaacattcaaacaacagggggagtgttctggaatcctatgttacggacaaacattcggaaccttgtcgcagtgttctggaattctatatgagggagaaaaactcagaacctagcagcagtgttctggaatcctatgggacggacatacatgtagaccccaccagcatgttctgggatcctatgtgaggga

SEQ ID NO: 5473 - DNA, 125 bp, Protomyxzoa rheumatica
aaaactacacagaagcattatgagaaacttctatgggatgtgtgcattcatctcacagaattgaatctatcttatgatttagcagttttgaaacactgtagaatctgcaagtggatatttggagc

SEQ ID NO: 5474 - DNA, 348 bp, Protomyxzoa rheumatica
tgaagtttctcagaatgtttctgtgtagtttttatttgaggatatttccttttccaccaaataaccctttgtagattctacaaaaacagtgtttcaaaacatctctatcaaaagaaaggatcaattctgtgacatgagtgtactaatcacaaagaggtttcccagaatacttttgtgtagtttttatgtgaagatatttgattttccacagtaggtctcaaagagctccaaatatccactctcagattctgcaaaaaagagagattcaaaactgctgaatcaaaagatagattcaactttttgagttcaatgcacacctcacaaagaagtttctcagaatgcttctgt

SEQ ID NO: 5475 - DNA, 153 bp, Protomyxzoa rheumatica
gttacatcacccagttgatcagtgcagagatatttcacaataatccctgcaggcagatcctagactagagttgaatgacctgggtgatgagtgcagagatatttcactatgccccctttcagcagagggtagacaagagttacatcacctagg

SEQ ID NO: 5476 - DNA, 223 bp, Protomyxzoa rheumatica
cagtattcacacgacacctccagtacacaccacacacacatataagtaccccatgcacttactacacacacagaccacacacacacaccatacatatacatcacacacatacatctgcgcacatctcacagagtacatacaatcctcacttttagaacttaattcagcttttaaggagcctggatagtatagtattttattggcgtttgaatgagctaagaaa

SEQ ID NO: 5477 - DNA, 216 bp, Protomyxzoa rheumatica
taactcttgtccacactctgcctacagggggcattgtgaaatatctccgcaatgatcacccaggtgatggtactcttctctatactctgcctatagagggatttgtgacatatctcttcactgatcacccaggtgattgaagtcttgtatatgctctgtctatgggggcattgtgtcaaatttctgcaccaatcacccgggtgatgtaactcttgt

SEQ ID NO: 5478 - DNA, 159 bp, Protomyxzoa rheumatica
gagaatgcgtctatctagtttgtatgtgaagatatcccgtttacaacgaattcttcaaagagctccaaatatccacaagcagatcctacaaaagcagtctttcaaaactgctctatcaaaagaaaggttcaactctgtaaattgaacacacacatcaca

SEQ ID NO: 5479 - DNA, 180 bp, Protomyxzoa rheumatica
aagatgtttcctttttcactataggcctcaaagcactctgaaatatctatttttagattattctaaaaccgtgtttctgaactgctgaatgaaaagaaaggtttaactctgtgagatgtatgcacacatcacaaagcgattactcagatagcttccttctactttttatccttggatatt

SEQ ID NO: 5480 - DNA, 514 bp, Protomyxzoa rheumatica
ttttctttgattgctttccattccattccgttatagtccattgaagtccattcctttccttttcattaaattccattccagtcaattcctttccattccgttccattgcattctgttcgattccattccactccattcaattccattcgagtaaatttcattatattaccttccattcaattcgagtacattccattctgttacattcctttcttttcgagttcattcatttccattgcaatcaaatcgtttgcaatgtactccattccattcgagtccattccgtttcactccattccattcaagtccattccattctataacatttcaatcctttccattccattacattcgagtccattcgattccattttattcgagtccattccattgcattccataccgtttgattacattccattaatttccattcgagtccattcaattccaatccattctatttgattccattccattttattcctttcatacccattccattcctttccattcc

SEQ ID NO: 5481 - DNA, 226 bp, Protomyxzoa rheumatica
ggaattgaatggaatcatctcatggactcgaatgtaatcatcaaatggacacaaaaggaatcatcatcgagtggattcaaatgaaatcattgaatggacttgaattcaatcatcaaatggtctcgaatggaatcatcatcgaatagaatcgaaaggaatcatcaagtggaatagaatgccgtcatgattgaatggaatcgaatggaatcatcattgaatagaatca

SEQ ID NO: 5482 - DNA, 133 bp, Protomyxzoa rheumatica
ccattccattccattccattccactccactcccctccactcaactccactccatttcttcccattccattccactctttttcattccattcatttctttcgacaggatctcactctgtcacccaggctggagt

SEQ ID NO: 5483 - DNA, 164 bp, Protomyxzoa rheumatica
cattccattcgatcccattacatttgtttctattccattcaagttcataccaatcgagtcctttccattccattcattgaaattccattcaattctatttcattcgagttgataccattccattccgttccatctgattccattccattctattcctttccatt

SEQ ID NO: 5484 - DNA, 144 bp, Protomyxzoa rheumatica
agccttttgaggcctatagtggagaaggaaatatcttcacttaaaaactatgcagaagcattctgagagacttctttgtgatccgtgcattcatctcacagaatagaatctttctttggattgagcagtattgaaacagtcttt

SEQ ID NO: 5485 - DNA, 303 bp, Protomyxzoa rheumatica
taggattccagaacactgctacaaaaatctgaatgattatacctcacagaggatccccgaacactcctgctctggtccgaaagtttctccctcagataggattgcagaacactgctgctgggttctgagtgtttgtccctaacatacaattccagaacactgctaagtgggtctaaatgtttattcttcatgtaggataccagaacactgctgctatggtctgaatgtttgtccctcacttaggatttcagaaccatactacgggggtctgaatgtttgtccctcacataagattccggaaca

SEQ ID NO: 5486 - DNA, 137 bp, Protomyxzoa rheumatica
cagaaattactttgtgatgtttgcattcaactaacagagttgaacctacctttccataccgcaattatgaaacactattttcgtagtatctgcaagtagatatttggactactttgaggccttcgttggaaacagga

SEQ ID NO: 5487 - DNA, 131 bp, Protomyxzoa rheumatica
ggcacgtgtatatgtatgtaactcacctgcacaatgtgcacatgtaccttaaatcttaaagtataataaaaaaattaaaaaaaaaagaaaactgaaaaaaaaaacaaaattgctgtatgaaaaggaatgtt

SEQ ID NO: 5488 - DNA, 138 bp, Protomyxzoa rheumatica
attcaaatggaatggaattgaatggaatgcaatcgtatggaatggaatcagatggaatggaatcaaatagaatagaccaaaattgaatcgactcgaatggaacggactcgaatgtaatggattgcaatgtaaatgaat

SEQ ID NO: 5489 - DNA, 161 bp, Protomyxzoa rheumatica
ctctcacagagttaaatatttcttttgattgagtagtttggaaacactggttttgaagcatctgcaagggcatatttgggagtgcattgaaggctatggtgaaacatgaaatatcttcggataaatactagaaagatgaattttgagaaactactttgtga

SEQ ID NO: 5490 - DNA, 313 bp, Protomyxzoa rheumatica
ctatggtggaaaaggaaatatcttcacataaatagtagataggaacattctgaaaaacttctttgcaatgtgttttttcatctcctagagttgaacctttcttttgaaagacgagttttgaaatatgctttttgtagaacctgcaagtggacatttcaagcgccttgagccctatggtggaaaaggaagtattttcacatgaaaactagacagaagaattctgagaaacttctttgtgaagcgtgcgttcatcttacagagttgaacatttcttttgattaagaagtttggaaacactctttttgtagaatct

SEQ ID NO: 5491 - DNA, 126 bp, Protomyxzoa rheumatica
aggctgcaaagcgctccaatatccacttgcagattcttcaaaaagagatttgcaaaactgttcaatcaaaagaaagtgttaactctgtgagattaatgcacacatcacaaaaaagtttctcagatt

SEQ ID NO: 5492 - DNA, 333 bp, Protomyxzoa rheumatica
aaaaaaaagttttgacttaactggggcaaaatgagtaacactagccaaaaagtcaggatgcataacatctgtatatcatgtgaccctggcaagtcacagctcctcaaagccaaattttttccatcattctcacaaggtagaaatcgtttggctaacccttactgaactaccaggaaaagctaccaggatagagggagcttcagcatatcactgaatgctaaatttagtgactggacgctaaatttcgtgacagaatttttttttttgagagacagagtctcactctgttgcccaggctagtgtagggtggcacaatctcggctcactgcaacc

SEQ ID NO: 5493 - DNA, 229 bp, Protomyxzoa rheumatica
gaatgcatacatcacaaagaagtttctcagaatgtttctgattactttttatgtgaagatatttcctttcccacaataggcctcaaagggcttcaaatatccacttgcagattgtacaagaagagtgtttcaaaaatgctcaatcaaaagaaagtttcaactctgttaaaggaatgcacacatcacaataaatttatctgaatgcttctgcataatttttatgtgaaga

SEQ ID NO: 5494 - DNA, 165 bp, Protomyxzoa rheumatica
tctttagtcagagactggagaatagttataactcctggatgatcggttcagaaacatgtcacaatggcccctccctgcggagtctggagaagctttgcatcatttgggtgatcagtgcagatatatatcacaatgtcccctgttcaaaaagcctggaaatgattt

SEQ ID NO: 5495 - DNA, 130 bp, Protomyxzoa rheumatica
gtatatttagagaactttgagtcctacggtagaaaaggaaatatcttcacataaaaacaagacagaaacattgtcgggaaactattttgtgatatttgcattcaactcacaaagttgaacattcctcttg

SEQ ID NO: 5496 - DNA, 154 bp, Protomyxzoa rheumatica
tcacaaagcagattctgagaaagcttctgtcaagtttggccgtgaagatatttccttttcaatcttagtcctcccattgctccaagtatccacttgtagagaatacaaaaagattgtttcaaaactgctctctcaaaaggaaggttcaactctg

SEQ ID NO: 5497 - DNA, 141 bp, Protomyxzoa rheumatica
gatcacaccactgcactccagcctcactgacagaacaaaactctgactcaaaaaactgatctctggaaaggcattttctttttctgcaacgtagccaactagctaagtttgtattgaagccatcctttaatttttaacagg

SEQ ID NO: 5498 - DNA, 178 bp, Protomyxzoa rheumatica
tctaggctctgcctacaggggcattgtgacttatctctgcactgatgacccaggagattttactcttgtctaagctctgcctatagggacattgggacaaatatctgcactgaccactgatttgatgaaaaacttgtctaggctttgccgacagtgggatttatgacatatctctgca

SEQ ID NO: 5499 - DNA, 125 bp, Protomyxzoa rheumatica
aaagtttaaaataaggtttcattgttttttgctacagcaatataaagcagccgagaacttctatttctattttttatttactatgataaaatgtaatgtattaaataatactggtgcaagaacat

SEQ ID NO: 5500 - DNA, 128 bp, Protomyxzoa rheumatica
ctccacaaaaagagtgtttcaaaacttttctgtctacacaaatcttcaactctgttagttgaggacacacattagagactatcttctgagaatgcttctgtccagtttttaagggaagatatttcctt

SEQ ID NO: 5501 - DNA, 247 bp, Protomyxzoa rheumatica
ttccaacgaaggcctcaaagaggtccaaatatcaatttgcaggctttacaaacagactgtttccaaaatgatgtatgaaaagaaaggttaaaatctgtgagttaaactcacacatcagtatgcagtttctgggaatgattttgtctaggttttatgagaagatatttcctttccttcaattggccacaaagcgcttgaaatctccacttgcattcaacaaaaagattttttcaaatctgctctgtct

SEQ ID NO: 5502 - DNA, 142 bp, Protomyxzoa rheumatica
agagggaaggaaggaaagagggaaggaaggaaggagagaaggaaggagggaaggaaggaagaaaggaagggaaggaacatggatatgcacaaaaacaaaatttaaattaaaacggaagtctatcatctgacctaattggaaa

SEQ ID NO: 5503 - DNA, 124 bp, Protomyxzoa rheumatica
gtgatgtgtgcattcatctcacagagttaaacctttctcagtaatatggaaactctctttttgtccattgtgtgaaagcacattttggagttctctgaggccaatggcaaagaaagggaatacc

SEQ ID NO: 5504 - DNA, 259 bp, Protomyxzoa rheumatica
tggaatagaatcaaatgtaatgggatcgatttgaatagaatataattgactcgaatggaatggcatagaatggaatggactagagtgaaattgactcgaatcgaatggactggattggaatggactcgaatggaatggaatggattggactcgaatgtaatggactggattggaatttactcaaatggaatggactggagttgaatggaattgaatggaatcccaaagaatggaatgcaatgcaatggaatggaatgga

SEQ ID NO: 5505 - DNA, 212 bp, Protomyxzoa rheumatica
ttcggttccattccattcgaatcaatttcatggcagtcctttacattcgagaccattctattgcaatccattccattccagtccgtttcatttgaacctcttccattcaattctattccataagattggattcattcgattccattgcatactattgcattacattcttttccgttttattcgaataaactccatttggaacattcctttcg

SEQ ID NO: 5506 - DNA, 196 bp, Protomyxzoa rheumatica
gaatggaatcatcatcgaatggaattgaatgggatcatcgaatggactcaaatggaagcatcatcaaatggaatcctttggaaccatcgaatggaaaggaatggtattatcggatggaattgaatggtatcatctttgaatggatttgaatggaatcatccaatggaatcgaatgcaatcaccatcgaatggaatc

SEQ ID NO: 5507 - DNA, 128 bp, Protomyxzoa rheumatica
agagtctacaaaacactgggtttccgaacacttccatcaaaagaaggatttaactctgtgacgtgaaggcacacatcagaaagcattttctcataacacttccttccagtttttatctgaagacatta

SEQ ID NO: 5508 - DNA, 169 bp, Protomyxzoa rheumatica
aacttctttgtgatgtgtgtcctcaactaacagagttcaacctctcgtataatacagcagtttgaaaaaacactttttgtagaatatgcaagtggatatttgaacagctctaactatttcgttcgaaatgggaatatcttcatataaaatctagacagaagcactctca

SEQ ID NO: 5509 - DNA, 187 bp, Protomyxzoa rheumatica
tccattgcattgcattccattctattccattacattgcattgctttccattcaatttgattacattccattcgattccgtttcatttgaatcaattacattgcaatccattatatttgagtccattctattccattgcattgcattccggtccattgcattctattcaattcctttcaattccattc

SEQ ID NO: 5510 - DNA, 132 bp, Protomyxzoa rheumatica
aatcgcctcctctgaacctccgcgccaccgtcgccggcctgtccgtgaccctgaagcctcccagctgccaccgtggagcgcctggcggcagaacgcagaactctagctctctttgctggtctcctgggtaga

SEQ ID NO: 5511 - DNA, 130 bp, Protomyxzoa rheumatica
caatccattcaaatgcattccattccattgcgtttgagtccattccattccatgctattccgtttgagtccattcaattcaattccattcaattccagtcgagtccattccaaacacattgtattccagt

SEQ ID NO: 5512 - DNA, 154 bp, Protomyxzoa rheumatica
tttaaattttctttgtaatttattctataatgcattagttgttcaggagaatgttgtttaatttctacatatatgtaattttcacaatatttctataatcattaatttctagtttcataccaatgtggtcagaaaaaaatagttgatatgattt

SEQ ID NO: 5513 - DNA, 157 bp, Protomyxzoa rheumatica
atgtgagggacaaacattcagaacacagcaggagtgttctggaatcccttgtgtaggacaaacataaagacccttgttgcagtgttctggaatcctatgtgaggggcaaacattgaaatcctagcagcagtgttctggatttttatgtgatggacaa

SEQ ID NO: 5514 - DNA, 135 bp, Protomyxzoa rheumatica
tgagatgaatgaacatatcacaaaccagtttctcaggtatcttccttctagtttttattctgtgatattcccattttcaccattggacttaaagtgcccccaaaagtcctttcactgagttaacaaacaccgtgt

SEQ ID NO: 5515 - DNA, 155 bp, Protomyxzoa rheumatica
aataaccaaggataaaaacttgaaggcagctatcagagaaaccgctttgtgatgtgtgaattcatctcacagagttaaaccttacgtcttattcagcagtttggaaacactatttttgtagaatcaccaaagggatacttcggagaccattgagg

SEQ ID NO: 5516 - DNA, 133 bp, Protomyxzoa rheumatica
aaatggactcgaatgctatcatcaaatggactcgaaagcactcatcattgaatgcaattgaaaggtatcattgaatggacatgaatggaattaccatcgaatagaattgaatggaaccatcaaatggactcga

SEQ ID NO: 5517 - DNA, 155 bp, Protomyxzoa rheumatica
gcactcccaaatatcccttcgcagattctacagaaacagtaattccaaactgttgaatgaaaagaaaggcttatctctgtgagatgaacgcacaaaatcacaaagcagtttatcagataccttacttctagtttttatcgtagggtaattcactt

SEQ ID NO: 5518 - DNA, 326 bp, Protomyxzoa rheumatica
ttgtgtggcattccgtgcaagcccttgtaaggtcagcataaggacagttgtagggagatgcccctcattcccagacgaggagtacgaagtgcgtgcacacagtcctactacctggcgagtgtattagtagggtttcccggtgtgttttcagcatgtgaagattctgcttgtgtcaccttcctatgcatcccatccccgctttagtttataggagtttatacaagatctggtttctagggaagttgggggtcctagatgatggtcctgttttctttgtaataaagtaggtgttacaaagtttcgaggtgggcgccttttaggaatcc

SEQ ID NO: 5519 - DNA, 137 bp, Protomyxzoa rheumatica
ctgtccctaacatcactttgaagcgctataacactattaacctgctccattttttcaggtgaacaacaataagagcacagctactctccaaaacaaatatcttactctcccctagggaagatttacgtgacacttct

SEQ ID NO: 5520 - DNA, 152 bp, Protomyxzoa rheumatica
agagcagttttgaaacagtctttttgtataattatcaatcttacatttggagcactttgtgggctatggtggaaaaggaaacatcttctcacaaaaattagacagaagtattatgagaaactttttgtgatgtttgcattcaactcacagag

SEQ ID NO: 5521 - DNA, 160 bp, Protomyxzoa rheumatica
aaatattcacttacaaattctacgaaaagagtgtatcaaaactgctctatcaagaagaatgttcaattccatgagtggaaagcaaatatcacaatgtagtttctgaaaatgcttctgtctagtttttttgtgaatatatttccttttctaccataggcct

SEQ ID NO: 5522 - DNA, 146 bp, Protomyxzoa rheumatica
agagcaagtttgaaacactctttttgtagtatctggaagttcacatctggatcgctttgaagtctatgctgaaaaaggaaacatctttccacaaaaactagacagaagcattctcataaacttgtttgttacttgtgtactcaact

SEQ ID NO: 5523 - DNA, 199 bp, Protomyxzoa rheumatica
tttttgtagaatctgcaagtggatatttggatagctttgcggattttgcttgaaacgggagtatcttcctattaaacctagacagaaacattctcagaaactgctttgtgatgtctgcattcacgttacagagttgaatattccccttcatagagcaggtttgatacactctttctgtagtatctggatgtggacactt

SEQ ID NO: 5524 - DNA, 123 bp, Protomyxzoa rheumatica
tttccttttccacaataggcctcaaagctctccaaatatcaactttcagattctgcaaaaagagagattcaaaactactcaattagcagataggttcaactctgtgagttgaatacacacatc

SEQ ID NO: 5525 - DNA, 130 bp, Protomyxzoa rheumatica
gacatatcactgcactgatcacctagatgatgtaagccttttttaggtttgcctacagaaggctttgtgacatatctatgcacagatctctgaggtgatgctactcttgtctaggcactgcctacagggg

SEQ ID NO: 5526 - DNA, 147 bp, Protomyxzoa rheumatica
atgaccaacacagacacctgggtctctgctaccaacaatacgagctaatgtataatgattgcaggtctgtaaacagcaggctttccatatcacatgtggcaagctctgatgacaaccctgtgtgacaggtattgttgtcggaggcaa

SEQ ID NO: 5527 - DNA, 175 bp, Protomyxzoa rheumatica
tgatgattccatttgattcaattccatgatgtttccattcaattccatttgatgatgattccattgattccattcaagtccatgtgatgatgagtccatacgagtccgttcattgatgattccattccatttcatttgatgcttctattcgattccaatcgatgatgattccatc

SEQ ID NO: 5528 - DNA, 153 bp, Protomyxzoa rheumatica
ggaaacacttttttggagaatctgtgaaggtacattttggagcccatggagtcctgtggggaaaaaccaaatatccacagataaaagctagaaagaagctatgtgtgaaacaactttgtgatgtgtggatttatctcacagaattcaaccttt

SEQ ID NO: 5529 - DNA, 241 bp, Protomyxzoa rheumatica
tgctcctcacataggattctagaacagtgctgctgaggtctaaatgtttgtccgacacatatgattccagaacactgctaagagggtctgaaggtttgttcctcacacagaattccagaacactgctacgagcatctgaaagtttgtccctcacacaggattccagaacactgctacgagggtctgaaagtttgtccctcacacagaattccagaacactgatacgaggttcccaatgatt

SEQ ID NO: 5530 - DNA, 261 bp, Protomyxzoa rheumatica
ccatctgattcctttccatttgattacattccattcaagtcaactccatttgattccatttctttcgattccattcctttctattccaatccatttgggtccactttaatcaagacgattccattcaagtgcattcctttcgagtccattccattcgtgtccaatacattccattccattcaattccctttcattagagtgcattcgatttttttttctttccgtggattcaaatgcattagaatccattccattcgattc

SEQ ID NO: 5531 - DNA, 239 bp, Protomyxzoa rheumatica
actctaaatgtcctcttgcagatactacaaaaagggtgtttcaaaactgctcaatcaaaactaaggttcaactctgggagatgaatgcacatatcacaatgaaggttgtcagaatgcttctgttttttatatgaagatatatgaagatatttccttttccaccatgtgcgtcaaagccctcaaaatgtccacttacagattctccaaaaagagtgtttcaaaattgctcaatgaaaagt

SEQ ID NO: 5532 - DNA, 144 bp, Protomyxzoa rheumatica
acataatacatgattttaggctgtggacaatttaacactgattgcataaacaaagaaacaagcaaaacagagtttggagccaagatggccgaatagcaacagctccagtctacagctcccaaaatgagtgacacagaagatggg

SEQ ID NO: 5533 - DNA, 615 bp, Protomyxzoa rheumatica
ccagaacactgctgctgggttctgaatgtttgtccctcacctaggataccagaccactgcaacgattttctgaaagtttgtccctcacataggattccagaacattgctgctgcagtccaaatgtttgtccgtcacataggattccagaacattgctgcgagggtctgaatgtttgttcctcacataggatttgagaacacttagtgttccagaacactcctgctgtggtctgaatgtttgtcccacagataggcttccataacactgctatgaagtaattaaggtttctccatcacacagaattccggaacactgctacgtgggtctgaacgattgtcccttatgcagaactccagaacacagctatgagagtctgaatgattgtccctcaaataggattaaagaacactgctgctggggtctgaatgtttgtcccacacatcggattccagaacactgctgctgtgttctcagtgtttttccctcacatagaataccagaacactgctacgatggtctgaatgtttgtccgtaacataggattccagaacaatcccgctgttgtttgaatgtttgaaccccacataggattccagaacactgctgctggggtc

SEQ ID NO: 5534 - DNA, 127 bp, Protomyxzoa rheumatica
tgctgcagaccagttatttacgctatggcatgtaatacatcccaaatggcagtaagtcattgtttatttagcttttgtgcttatatttttcagaggaaaaaacactactgtaaattgtaaatagcca

SEQ ID NO: 5535 - DNA, 135 bp, Protomyxzoa rheumatica
ttctgagtgtttctccctcacatataactccacaacactgcgacgagatctgaatgttggtacataaaataggattcctgaacactcccgctgttttttggatatttgttcctccacttgggattccagaacact

SEQ ID NO: 5536 - DNA, 361 bp, Protomyxzoa rheumatica
aattgctatgaggttctgaatgttttaccctcacacagaattccagaacactgctacgagagtctgaatgattgtccctcacataagattccataacactgctgcaggcttctgaatgtttgtccctcacataggattccagaacccccctgcaggggtctgcatgtatgtccgtcacataggtttccagaacactgctgttgtgttctgaatgtttctacctcacatagaattccagaacactgccacgatggtctgaatatttgtccgtaacacaggatttcagaacactcccgctgttatttgaatgtttatccctcacattagattccagaacactgcttcgaggatctgaatgttt

SEQ ID NO: 5537 - DNA, 154 bp, Protomyxzoa rheumatica
tacactatttttgtagaatctacaagtggatatttggagtgatttgaggcccattgtggaaacggaaatatcttcacataaaaatcccatggaagcatactgagaaacttctttgtgatgagtgcattcaccacagagagttgaaactttcttt

SEQ ID NO: 5538 - DNA, 137 bp, Protomyxzoa rheumatica
atagagcagttttgaaacactgcttttgtagaatctgcttttggatatttggaactcttaggaattcattgtaaacggcatgttttcacatacaaattggacagaggcattctcagaaagttcttatttatgtgtgc

SEQ ID NO: 5539 - DNA, 162 bp, Protomyxzoa rheumatica
caccatcggcctcaaagccctccaaatgtccacttgcagaatacacataaagagagtttcaaaaccgctaaatcaaaggaaaggtttaactctggaatatgaatacacacgtcacaaagaagtttttcagataggatctgtctagattttatgtgtggatat

SEQ ID NO: 5540 - DNA, 151 bp, Protomyxzoa rheumatica
tcttggatctgcctatggtggcatagtgacatatctctgctctgatcacgcatatgatgtaacacttgtctaagctgtccctaaaggggaattgcgacagatatctccactgatcagccagttgatataacaattttctgggatttgtcta

SEQ ID NO: 5541 - DNA, 151 bp, Protomyxzoa rheumatica
tccattcctttccagtccattccaatcgattccattcaattgaattcatttccactagattccattccgttcaagtccatttcattcgagtccattcaattccagtccattccattcgagttcattccatttgattccattcctttccatt

SEQ ID NO: 5542 - DNA, 100 bp, Protomyxzoa rheumatica
tcgagtccattccactccagtccattccgttctagtctgttccattccagtccactacattcgagtccattccactccagtccattccgttctagtctgt

SEQ ID NO: 5543 - DNA, 129 bp, Protomyxzoa rheumatica
gcaccgatcacccagatgttgggaccattctctaggctctgcttacagggagcattgtcacacatgtctgcactgatcacccaggtggcggactattgtcttagatttgcctatgggggcattgtgaca

SEQ ID NO: 5544 - DNA, 125 bp, Protomyxzoa rheumatica
ctctgcaaagggacatttggaagcccattgaagaccatggggaaaaagagaatatttacagataaaaactaaatagaaggtatctgttaactgcattgggctggctggattcatctctcagagtt

SEQ ID NO: 5545 - DNA, 156 bp, Protomyxzoa rheumatica
aggtatgcctctcaaagaacaataaaagctgcatcactctaaaaatggaaaacagtttgtaactctgaggtgccataaattccccaaaaataggttaccatttaagttggcatcaaatttacctgaggcaacagcattttcattaaatagctatga

SEQ ID NO: 5546 - DNA, 144 bp, Protomyxzoa rheumatica
tgaatgcgcacatcacgaagaactttttgagaatacttctgtctactatttttgtgaagagagaccgtttccaacgaattcctcaaagaggtacatatatccattagcagattctacaaaaggagtgtttcaaaactactctat

SEQ ID NO: 5547 - DNA, 158 bp, Protomyxzoa rheumatica
aagttttacatcgcctcagcgatcagtgtagagatatatccatatgtccctctaggtagagcttagacaagagtcacatctcgtaggtgatcagtgcagagataagtcacaatgccaacataggcagagccttgacaagagttatacaacccgggtga

SEQ ID NO: 5548 - DNA, 182 bp, Protomyxzoa rheumatica
acagaaccattctgagaaacttctttgtgatctgtgcattcatctcacagagttggatgtttctattgatacagcagttttgaaacactctttttttagaatctgtaaatggatatttggagtcttttcaggcctacagtgtagaaggaaatatcttcacataaaaactatgcagaagcatt

SEQ ID NO: 5549 - DNA, 159 bp, Protomyxzoa rheumatica
ttttctgctcctttatctgtcttctctttcttgaatcttataatttgagtatttgctcttttgatgctgtcccacaaattccataagctttcttcattccttttcatttttcccctctgtatatttttaattaaactataagttcacagattctttctt

SEQ ID NO: 5550 - DNA, 133 bp, Protomyxzoa rheumatica
aaataaaattagaaattcaacagagacactgaagtcataaaagaagaaatatttgagctgaagggtacaatgaatgaaatggaaaatgcaatacagagtatcaacagcagacttatttaaacagaagaaagaa

SEQ ID NO: 5551 - DNA, 221 bp, Protomyxzoa rheumatica
gaggcctcaaagccctccaaatgtccacttgaagattctacaaaaagagtgtttccaaattgctccatgaaaagaaactttgaactctgtgagatgaacgcacacatcacaaagaagtttctcagaactcttctgtctcgtttttatgtgaaagtatttcttttccctctagaggcctcaaggtgcaagaaatgtcctcttgcagattctacaaaaagagt

SEQ ID NO: 5552 - DNA, 150 bp, Protomyxzoa rheumatica
tgtgacaatatttcctctttcactataggcttcacactgctcacaaatatctctttgcagattataaaaaaagactgtttccaacttgctcagtcaaaagaaaagttcagctctgtgagatgaatggacacaactcaaagaagtttctca

SEQ ID NO: 5553 - DNA, 141 bp, Protomyxzoa rheumatica
aaaaactagacagaagctttctgagaaccttctttgtctcatgtgcattcatctgacaaagttgagcctttattttgattgaggagactggaaccaatgtttttgtagagtatgcaaagggatatttttgaaccctttgag

SEQ ID NO: 5554 - DNA, 195 bp, Protomyxzoa rheumatica
aatggaaggtaatggaatgaaatgaaatggaatggattcaacctgagcggaatggaatgcaatgaaatggaatggaattgaatgaaatggaatggattggaaaaaacccgagtggaatggaatggaaaggaatgaaatatcaaagtacagaaacatatattatatactgtacataaaatatcacagcacccaaac

SEQ ID NO: 5555 - DNA, 177 bp, Protomyxzoa rheumatica
ccaccattttaccacaaagaaaaaaaaaacctgttataactaaccaattcagtaaattttcaggatacaatattaacatatgaacatcaggtgcatgtttttacagcaacaacagaatatctgaaaaaggaataaagataattccatttacgatatgatcaaatagaatggaacact

SEQ ID NO: 5556 - DNA, 170 bp, Protomyxzoa rheumatica
tgaatggagattttggagccctttcaggcctttggggaaaaaccgaatatcccaagatgaaaacttggtagaagctatctgtgaaacagctttgtgatgtgtgcactcatctcacacagataaacctttcttttgattcagtaggttggaagcattcattttgaagatct

SEQ ID NO: 5557 - DNA, 155 bp, Protomyxzoa rheumatica
gagtgttgaacctctgtttttattgagcagtttggaaacaatctttttgtagaatctgcaagtggatatatggagccctttgagtcctgctgtggaaaaggaaatattttcatattaaaactacacagaagcattctgagaaacttctttgtgat

SEQ ID NO: 5558 - DNA, 129 bp, Protomyxzoa rheumatica
aataatggtccatgaaacaaatgagatcctacttatctagccttttccttgatagattaaaaactgtaccaaaatcttactatattgcaaagacactagttcactcaattgagaatcctcagtatacaa

SEQ ID NO: 5559 - DNA, 152 bp, Protomyxzoa rheumatica
taaagaccaaatcataatgaataacgtttcttaggcttaaacccatagcaggagtaggaaatagttcaaaccttctgacttacatgaaaaaatacaatcttcaaaaactactgttttctaatctgcatgaatgtactgaactcgttgccacc

SEQ ID NO: 5560 - DNA, 204 bp, Protomyxzoa rheumatica
tcggtgatcagtgcagagatatgtctcaatgccccctgtcagcgaagcctatagaagagttacatcatctcggtgatcagtgcagtgatatgtcaaaatgcccctgtaggcagaggatggacaagagttacatcacctgggtgatcagagcagagatatctcacaataacccctgtaggcagagcctagacaagagttacctca

SEQ ID NO: 5561 - DNA, 125 bp, Protomyxzoa rheumatica
agcgtattgaggcctatggtgaaaaagcatacaacttccaataaaaacttgaaagaaacaatctgcgaaactactttttgatgtgtgtattcatctcacagagttaaagtttcctttggattcag

SEQ ID NO: 5562 - DNA, 175 bp, Protomyxzoa rheumatica
atggaatggaatggaatggaatggagtggaatggaatggacacgaaggtaatgtacttcaatggaatgcaatcgaatgaattgtaatgaaatggactcgaatggaatgggctcaaatgcattggaatttaatggaaaggaatagaatggaatggacttgaagggaatggactcga

SEQ ID NO: 5563 - DNA, 158 bp, Protomyxzoa rheumatica
caggggcattgtgaaatatctctgcactgatcacccaggtaatgtgtcccttctctaggctttgcttactgggggcattgtcacacatgtctgccctgatcacccacttgacggactattgtcttggatttgcctatgggggcattgtgacatatctc

SEQ ID NO: 5564 - DNA, 198 bp, Protomyxzoa rheumatica
gatccacccgcctcagcctcccaaagtgctggttcatttttaaaatataagaaaatttagataatcaaatgaaataacatttttccaataagcccacttctctcaccacttttatcatgttgatatgtagctttatagaacatttatttcatataaattaccaccttttaaagtatacactaaattacagataccgtg

SEQ ID NO: 5565 - DNA, 234 bp, Protomyxzoa rheumatica
ttcagaccacagcaggattgttccagaaaccaatgtaaggcacaaacacggagaacacaagagtgttctggaaccctatatgagggtcaaacattcagaccacagcagtagtgttctggaatcctatgtgagggagaataattcagatggtcatagcattgctctggaatcctatgtgagggacaaacatttagaacccagtagcagcattctggaatcctatttgagggacaa

SEQ ID NO: 5566 - DNA, 128 bp, Protomyxzoa rheumatica
tcacagagttgaacctatcttttgattaagtagttttgaatcgctctttttttagaattttcaagtgcatatttggagcgctgtgaggtctattgcggaaaaggaagtatcttcacataaaaactaca

SEQ ID NO: 5567 - DNA, 168 bp, Protomyxzoa rheumatica
acatacaaaaatatgcactctttatgggaggaaatatttgtaaaccatacatctgatgaggttaatatctataatatctaagaaactcattcaattcaataggaaaaacaaatacaatttgaatatcccttattcaaaatgcttggaaagagtagtgctttgaatttg

SEQ ID NO: 5568 - DNA, 134 bp, Protomyxzoa rheumatica
cattccattcctttccattccagtccattcaattcctttccattcaagtcctttccatttcactccattccaatcaattcgagtgcattccactccatttcattcccctctaatccattcaattccattccatt

SEQ ID NO: 5569 - DNA, 129 bp, Protomyxzoa rheumatica
tctgagaaacttctttgtgatgcatgcattcaactcttacagttgaagctatcttttgatagagcagttttgaaactcactttcgtagaatctgcacgtggatagtggcagcgctttgaggcctatgtt

SEQ ID NO: 5570 - DNA, 138 bp, Protomyxzoa rheumatica
tacccccgtggtgttctcatgacagtgagtgatacctgaaggttttataaggggcttttccccttttgctcagcacctcctggtgccttgcttcttgtttgcattcaccatgattgtaagttttctgaagccttccca

SEQ ID NO: 5571 - DNA, 149 bp, Protomyxzoa rheumatica
aaagcgctccaaatgtccactttcagattctacaaaaagagtttcaaaacttctgaattaaaataaaagtttatctcagtgagatgaatgcacacatcaccaagaagttgctcagattgcttctgtctagatattatgtgaagatattt

SEQ ID NO: 5572 - DNA, 203 bp, Protomyxzoa rheumatica
aatgagaaggaatgcaatggaatggaatggagtgcagtggattggagtggaatggaatggaatggtgtggaataaaatggaatggaatggtgaaatgaaatgtgagctaataatgtgctactgcactactgtgtgggtgactgagatccagttgaaataaaggaatgtaatgaaatggagtagaatggaatggaatggagtgg

SEQ ID NO: 5573 - DNA, 176 bp, Protomyxzoa rheumatica
ggaagggaatggaatggaatagaatggattggaatggaaaggacgtgaaaggaaaggaatcgaatggaatcgaatggcatggaatggacacgaaaggaacataattgaatggagtggacttgaaagtcctacaatggaattcaatgtaacagactccaatggaatggaaaggaatg

SEQ ID NO: 5574 - DNA, 137 bp, Protomyxzoa rheumatica
tccaaggtggaggtccacaagaaggctccagagtcattcacaggtgttgtcaacttccagcatcagtgcagctctccttacctggtaggctagagacacagacaatattggcaatatggtattcttgtgggatttgt

SEQ ID NO: 5575 - DNA, 191 bp, Protomyxzoa rheumatica
gcaagagttacataaccattgtcatcagtttaggaatatgtgaaaacgcccatgtaggcagagcataaacactagttacatcacctagtgaatcagtgcagagatatttcaaaaatccccctgtaggcaaatcctagacaagagtggaatcacctgggtgatcagtgcagggatatttcacaatgccccct

SEQ ID NO: 5576 - DNA, 165 bp, Protomyxzoa rheumatica
attctattcgattccatttcattcgattccattccatactatagccttccattcgattccactttagtcatataaattgcattcgaaacaatttctttatagtccattctacatgagtccaatcaattcgaatccattacctttgggtccataccattccattcc

SEQ ID NO: 5577 - DNA, 176 bp, Protomyxzoa rheumatica
attccattccattccattccattgcattccattccattcctctcaggttgtttgcattccattatattccattccgttgcattccattcctttccattccttaccactcgtgttgaatccattccactactttccattctattccactcgggttgattcaattgtattccatccca

SEQ ID NO: 5578 - DNA, 158 bp, Protomyxzoa rheumatica
tatttcatctacctataatgacagcaacaaccataaccttcctgagtttagcaaaatataaaaaggaaaacttgagagactgtactgcgtgctcaacaaaatcagaaaagagagctacaagaatgtacacgtggtgataatttttaaattctatgaga

SEQ ID NO: 5579 - DNA, 124 bp, Protomyxzoa rheumatica
agaatgagactctgtctcaaaaaacaaagaaaaaaaggtaaggtcagctatgatcatgccactgcgctccagcctgggggacatagtgaaaccccatttctaaaaaaataaatgacaaaagatt

SEQ ID NO: 5580 - DNA, 293 bp, Protomyxzoa rheumatica
gattgagcagttttgaaacactctttctgaaggatctgcaagtggatatttggacggctatgaggtcttctttggaaacgggaatatcttcacataaaatctagacagaagcattcacagaaacatctttgtgatgtgtgctttcaacttgcagaattgagccttccttttgatagtgtcgttttgaaacactctttttgtagaatttgcaagtggataattggagtgctttgaagcctttggtgtaaacgggaatatcttcacctataaactagacagaagcattctcagaa

SEQ ID NO: 5581 - DNA, 144 bp, Protomyxzoa rheumatica
gaagacatttcctcttttaccataggcctcaatgctctccaaaatatccctttgcacattgtacaaaaacagggttttaaattgctgaatgaaaaaaaatgatttaactgtgtgagatgaatgagcatatcacagagcagtttc

SEQ ID NO: 5582 - DNA, 128 bp, Protomyxzoa rheumatica
aagttatacaaaaccaagcatgtgtctctgtgcattttgttttctctcctcccttaatggtaaggaagggtttcatctcttttataggccaaatgctccacaaatgaatgtgttaacgaacgaacaaa

SEQ ID NO: 5583 - DNA, 184 bp, Protomyxzoa rheumatica
atgatatcaaaagtatagcaataaaaccaaacataaagttgtagtgtatcaaactattgtgcacagcaaaagataagagaacctttaagatgggataaaatatttgcaaaccatatatgataagaggttagtgttcaaaatatagcagaaactaatacaaatcagaagcaaaatactaataata

SEQ ID NO: 5584 - DNA, 152 bp, Protomyxzoa rheumatica
accatgggcctaaaagagctccaaatgttcactcgcagattctataaaaaaagaatttcaaaactgctaaatcaaaggaaagttttcactctgtgagatgaatgcgcacaatacaatgaagtttctctgattgcttttgtctagattttatg

SEQ ID NO: 5585 - DNA, 155 bp, Protomyxzoa rheumatica
ttgtgatgcatgcattcacctcatagagttaaaactttttcctaattcagcagattataaacacatttttggagaataaatgaagggacatttgggaacccactgagacctatggggaaaaagagaatttctccttaactaatggaaggaagcta

SEQ ID NO: 5586 - DNA, 135 bp, Protomyxzoa rheumatica
aaagaattttctgagaatgtttctgtcgagtatttatttgaagatatttcctttttctccattggactcaaagggctcccagataaccctttgcagattcctcaaaaatgttgtttccaaactgctcaaacaaaa

SEQ ID NO: 5587 - DNA, 134 bp, Protomyxzoa rheumatica
atttgatgatgattccatttgattccatttgataacgattccattcatgtccattcgatgattccacttaattctattgaatgatgattccaaatgagtccgttagatgaatccatttgattccattggatgat

SEQ ID NO: 5588 - DNA, 128 bp, Protomyxzoa rheumatica
tggaatggaatggaaaggaatggtatcaacccgagtggaatgcaatggaatgaaatggaattcaatgcaaaggaaaggaacggagcagaaaggaaatcaatggaatggaatgaacccgagtggaatgg

SEQ ID NO: 5589 - DNA, 211 bp, Protomyxzoa rheumatica
gtagtccagtgtggggagggggagggatagccttaggagatacacctaatgcacacaaacatgacacatgaatacatatgtaacaaacctacacgttgtacacatgttccctaaaaattaaagtataataataataaaagtaaataaataaataaataaacccagagctccaaaaaaaaaatagagaagaatggttcaactctatgagaag

SEQ ID NO: 5590 - DNA, 141 bp, Protomyxzoa rheumatica
ctatgctctgcctacaggggacattgtgacatatctctgccctgaacacacaggtgatgtaactcttttctagtctctccatacagagggcgttgggacaccactctgcacagatcacccgggttatgtaactcttgtcta

SEQ ID NO: 5591 - DNA, 146 bp, Protomyxzoa rheumatica
atcgaaaggaatcatcatggaataaaattgaatggaaacatcaaatggaatggaatggagtcatcatggaagggaatcgaagggaaacatcaaatagaatcaaactgaatcatcgaaaagaatcgaatggaatcatcatcgaatgg

SEQ ID NO: 5592 - DNA, 235 bp, Protomyxzoa rheumatica
ttgaattcaatggtgaaatgaaatgtgaggtgatattgtgccactgcactccagcctgggtgacagagtaagatgctcttgaaagaaagaatggaatggaatcgagtggaatggaatggattggaatgcagtggagtggagtggaatagggtacaacggaatgtgatggagtggaatggagtggagtggagtttagtggaggggagtcgagtgcagtggaattgagtggaatgga

SEQ ID NO: 5593 - DNA, 249 bp, Protomyxzoa rheumatica
ttttgattgaacagttttgaagtgctctttttgtagaatcttcaagtcagcatttggagtgctttgaggaccatagtggaaaaggaactatcttcacatagaaactagacagaagaatgctgacagacatctttttgacgttcgttaatctcacaaggttgagcctttcttttgattgaacagtttggagaatctctttttgtagaatctgcatgtggacacttggagcgctttgaggcctatggtgga

SEQ ID NO: 5594 - DNA, 223 bp, Protomyxzoa rheumatica
tgagtgatcagtgcagagatatgtcactatgcccccagacgcagatccaagacaaggatccatcagctggttgatcagtgcagaattatgccaccatgccgccagtaggcagatatagagaagagttacatcacctgcgtgaacactgcagaagtatgtcacaatgcccctgcaggcagagcctagacaacagtcccatcacctgggtgatcagtgcagaatt

SEQ ID NO: 5595 - DNA, 208 bp, Protomyxzoa rheumatica
tatgtgaagatatttccttttctaccataggcggcagatagctccaattgtcaacttgcagaatcttcaaaaaatgtgtttccaaactgcggaatcataagaaaggttcaaatctgtgagatgaatgcacgcatcacaaagaagtttctcagaattctgcgttctagttttaacgtgaaggtgtttccttttccactctaggcctcaa

SEQ ID NO: 5596 - DNA, 124 bp, Protomyxzoa rheumatica
tgaatgcttgtgctacacatgggattatagaacacgccatctgtggtctgaatgattgtcccccaaatgagattccagaacactgctactgggttatgtttcaccctcacataggattccagaa

SEQ ID NO: 5597 - DNA, 153 bp, Protomyxzoa rheumatica
gaatcctatctgagggagaaacattcagaccacagccggattgttctgtaatcctatgtgaggtaaaatcatttagacccacgtagcatttctctggaatcctaagtgaagaagacacattcagaccacaggaggagtgttctggaatcctat

SEQ ID NO: 5598 - DNA, 238 bp, Protomyxzoa rheumatica
atattagaagggttgggcaagattaagaatgattggaggaaattaaaagtggagagtcataactgtgatacacattggagacaatgaggaacaaaatcccttctataggtaaaatacatctttgttgcagaggacagatgtaaaacgttttctaagaatttagacaaaggaaaggctaacatgaaataaagacatagcatgaagacgaaggagatctgtgatcagggttccaaatgaa

SEQ ID NO: 5599 - DNA, 275 bp, Protomyxzoa rheumatica
tgagacaaacgcacacatcacaaacaagtttctcagaatgcttctagatagtttttatatgaagatatttccttttctaccataggacacaaagtgctctgaatgtccacctgaagattctacaaaaacagtgtttccaaactgctcaatcaaaagaaagattcaactctgtaagatgaacgcagacgtcctgaacaagtttcacagaattcttctgtctagtttttatgtgaaaatatttccttttccttcacaggacacaaagcactccaaat

SEQ ID NO: 5600 - DNA, 224 bp, Protomyxzoa rheumatica
aaggccacgaattgaatgaaatggaatggaacagactcgaatggaatagattggaatttagtggaatgtactctattggaatgaaatggaatgcattcaaacggaatagaattgaatggaatggactcgaatggaatgcagtggaatggtcccaaatggaaagtaatggaatggaatagacttgaaaggaatgtaatataattgaatggaatggaattgactct

SEQ ID NO: 5601 - DNA, 128 bp, Protomyxzoa rheumatica
cactccactctactccattccattctactccattccattcgattcctttatttcaactgaatctcactctttcacccagattggagtgcagctgtacaatcttagcacacatttcatttcaccattcc

SEQ ID NO: 5602 - DNA, 184 bp, Protomyxzoa rheumatica
cataggactccagaacaatcctgatgtgttctgaatgtattttcttcacataggattccaaaacagtgctatgagggtctgaatgtttgtctcacacgtaggattccagaacacccgagctgtggtctgaatgattatccttcccataggattccagaacactgctgctgggttctgagtgttt

SEQ ID NO: 5603 - DNA, 172 bp, Protomyxzoa rheumatica
aacttctttgtgatgtgtgctttcaactcacatagttgaagcttcctttcgatagagcagttttggaagtctttttttgtacaatttccatgtggatatttagcgccatttgaggcctctgttagaaaaggaaatatcttcataggaaaactagacagaatgattctcagaa

SEQ ID NO: 5604 - DNA, 126 bp, Protomyxzoa rheumatica
ttcattatctcacatgatgaattgaagattaaagcaaaataatttagggaattctgtgacagtttctgtttcacgttgtttaataatgacttcaaactcttatacatatatggagaactcctgact

SEQ ID NO: 5605 - DNA, 129 bp, Protomyxzoa rheumatica
ttcattccacatggatttctcaagtgtgtttctattcctgcagattaaattttcctcgtttttcctgacaactctccttgtctgaccctccccacttctaaggcaggtgttccctctgtgtgcactttt

SEQ ID NO: 5606 - DNA, 161 bp, Protomyxzoa rheumatica
attccattcgaatacattagatgattccattcgattccattcgatgttgattctattcgtgacctttagatgatttcacacaattcctgttgatgatgaatccattcaagtccatttgatgattacatttgattccattcgatgatgattgcattcaattc

SEQ ID NO: 5607 - DNA, 124 bp, Protomyxzoa rheumatica
agtaatattcaaacagtaggaattttttccagaatgaaaatttcctctacaataacattcacctttttttccctgatgggcaaataaaagtcaacatttctaacattgctggatgttatttaaa

SEQ ID NO: 5608 - DNA, 165 bp, Protomyxzoa rheumatica
tgcaaaaagagagattcaaaacggcttaataagatgataggttcgaacctgtgaattgaaatcacacatcccaaagaagtttctcagaatgcttccatgtagctttcatgtgaagatatttcctatgccacaatagatctcaaggggctccaaatgtccacttgc

SEQ ID NO: 5609 - DNA, 170 bp, Protomyxzoa rheumatica
aggaaaaaaaaggaatattttttagggaaaaaattgaaaaaatatctgtgcaactgctttgtgatgtgtggcttcatctcccacagttaagctattcttttgattcagtaatgtggaaacactctatttgaagtatctgtgaagggacatttggaagcacattgaggact

SEQ ID NO: 5610 - DNA, 139 bp, Protomyxzoa rheumatica
tggaacggtgtggagtcgagtgatgtggaaaggaattgaatggagtggagtgtagtggaatgaagtggaatcgaatggaattgttagtaatggaattgaatgcagtggagtgcagtggagtggagtggaatagaatgta

SEQ ID NO: 5611 - DNA, 157 bp, Protomyxzoa rheumatica
ctcttctccactccactccattccattccataccattccataccactccaatccattccactccagtccactccattctattccatttcctttccactccattcctatcttttggcaggatttcactctctcacccaggctggagtgcagtggcaca

SEQ ID NO: 5612 - DNA, 243 bp, Protomyxzoa rheumatica
tcaagcgattctcctgcctcagcctcctgagtagctgggactacaggtgcaagccaccataccctgctatttttttgtattttagtagagatggggtttctctgtgctgcccaggctgctcttgaactcctgagctcaggcaatcctcctgcctcagcctcccaaagtgctagaattacaggcatgaaggatttctaatattccgtaaacttagttaatatagcaggggctggatttgagagg

SEQ ID NO: 5613 - DNA, 214 bp, Protomyxzoa rheumatica
ctttttgtagtatctgcaaatagacattttgagcacgttgacacctacggtgagaaaggaaataccttcccataaaaactacaacacagaagcattctcagagacttgtttgtgatgtgtatactcaactaacagagtagaacatttctttttgcagaacagtattgaaacactctttttataggatctgcgagtggatatttggatagttttg

SEQ ID NO: 5614 - DNA, 186 bp, Protomyxzoa rheumatica
tgcactttcaaatatcccattgcatattctacaaaaacagttttttcaaactcctcaatcaaaagaaaggtttaaatctgtgggaagaatacacacatcacaaactggtttcccacaaagcttcattatacttctaatctgaagttatttctttttttaccattaggtaagttcaatcccaaatat

SEQ ID NO: 5615 - DNA, 520 bp, Protomyxzoa rheumatica
tgtgggacaagcattcagaccctcgtagcattgttctgtaatcctatgttaggaaatcacattcagaacacagcaggagtgttctggagtcctatgtgagggacaaagattcagaccctcataacagtgttctggaatcttatgtgaggtacaaacattcagacccccctagcagtgttctggaattgtatgtgagggacaaacactcagaacccagcagcagtgttctggaaccctatttgagggacaaacagtcagatcacagctgtattgttctgaaatcctatgtgaggaacaaacattcagacattcgtaacggtgttcttgaatcctacgtgagggacaaacattcagacgccagcagcattgttttggaatcctatgtaagggacaaacattcaaacaacagcgggactgttttggaatcctatgtgtgggacaaactttaagacaacagcaggagtcttctgaaatcctatgtgagaaacaaacatttacaacacagcagcagtgtcctgga

SEQ ID NO: 5616 - DNA, 132 bp, Protomyxzoa rheumatica
ctgtaagctgtatgtacacatcacaaagcagtttctgagaacgattctgtctagtttgtctatgaagatatttccttttctaacatagcactcaaacggcagtaaatatccacttgtaaattacacaaaagg

SEQ ID NO: 5617 - DNA, 128 bp, Protomyxzoa rheumatica
aaatatccacttgcaaatttcacaaaaagactatttcaaacctgctctctcaaaagaaatgttacacactgtgagttgaatgcacacatcagaaagtggttcctaagaatgagtctgtctagttctta

SEQ ID NO: 5618 - DNA, 198 bp, Protomyxzoa rheumatica
caaccatctgatctttgacaaagctgactaaaacaagcaatggggaaaggattgcctatttaataaatggtttacaaaaattaagaagccaagagtgttttaaatcgagtttccatgtggctagatatgacctgctggtcactcttatattttttctcctatttttttctccattcattgagctatgtttgacaaatt

SEQ ID NO: 5619 - DNA, 216 bp, Protomyxzoa rheumatica
ggaatggaacggaatggaatggaatggaatgaaatggtgacaagaaatgtgtgctgagactgtgccaatgcactacagcctgtgtgacagagggagatcctgtcgaaagaaagccttggaatggaagggattggaatggaatgaattggactggagtggagtcgaattgagtggagtggagtgcagtggagtgcagtggaatagaatggaatggaa

SEQ ID NO: 5620 - DNA, 315 bp, Protomyxzoa rheumatica
atgattccattcgattccattcgatgatgattctattcgattacatttgatgatgattacattcgattccattcgatgatgattccatttgttccattcaatgtttccattcgatttcattcgatacgtattccacttgagtccgttagatgattccatttgattccatttgatgatgattccattcggtgccatttgattattccatttgatttcattcgatgatgattccattgatatcttttgatgattcctttccattctgttcgatgattcttccattcgagtcctttcgatgatgactccatttgattc

SEQ ID NO: 5621 - DNA, 175 bp, Protomyxzoa rheumatica
caacacatttctaagaaagtctgccttcaaaatatttctcagacctggcagccttcacctcaatttctgctcccaccttaggctaggctaccatcaattctgtcttgactttctggaatagcctcctaattgatgtgcttctacctttgcctgcttatagtctattatcagggtg

SEQ ID NO: 5622 - DNA, 133 bp, Protomyxzoa rheumatica
ccactccactccactccattgcatcccatgtccttccacaccattccagtccactccactccattctattagattatatcccatttcattacactccattccactgcactgcattccactccactccactcca

SEQ ID NO: 5623 - DNA, 253 bp, Protomyxzoa rheumatica
gaatgcatgcacagatcacaaatcagtttcttagaaagattctttctagtttttatttaaaagcaattttctttttgaccataggcctcaatgccctcccaaatatctcttcacagattctgcaaaaacagtgtttccaaactgctcaatcaaaagaaactttcaactctgtgagttgaatgcacacatcacaaataattttctcagaatgcttctttctagttttcatatgacaatatttccttttccacaa

SEQ ID NO: 5624 - DNA, 127 bp, Protomyxzoa rheumatica
tggaaatgcagaaatcacccatctctgcatagctcacgctgggagatgtagactggagcagttcctattcaaccatcttggcgctgtcacatgagcctttcttttgattgagcagtttggaaacact

SEQ ID NO: 5625 - DNA, 123 bp, Protomyxzoa rheumatica
cctccaaatatctagttgcagattctacaaaaagtgtgtttcaaaattgctcaatcaaaagaaagttgaactatgtgagatgaatgcacaccttgcaaagaagtttctcagaatgcatctgtg

SEQ ID NO: 5626 - DNA, 193 bp, Protomyxzoa rheumatica
aaatgtccacttgcagattctacaaaaagagagtttcaaacctgctctatcagaagaaaggttctaatctgtgagttggatgcacacatcaccaaggagtttctgaaaatgcttccttctgcttcttatgtgaagatatcccgtttccaagaaggcctcaaagtggtccaagtattcacttgcaaattctaca

SEQ ID NO: 5627 - DNA, 153 bp, Protomyxzoa rheumatica
catgcaactccattccattccgttccataatgttctattccattccgttccatttgggttcattacattccattcgaatccattccattccattctattgcactcgagtcgaatccattctattccattccattcgagtccattccatttcat

SEQ ID NO: 5628 - DNA, 122 bp, Protomyxzoa rheumatica
tagatgattccatttgattccattggatgatgattccattcgatgccattcgatggttccattcaattttatttgatgatgattccatctgactccattaggttattcaaattgatgagcat

SEQ ID NO: 5629 - DNA, 148 bp, Protomyxzoa rheumatica
ctgctcaatcaaaagaaatgtttaactttgtgagatgaatgcacacatcacaaagtactttgtcagaatgtttctgtgtaggttttatgtgaagatgtttccttttccaccattggctctcaaagcactcaaaatatccacttgcaga

SEQ ID NO: 5630 - DNA, 208 bp, Protomyxzoa rheumatica
agcagtgttctggaatcctgtgtgagggacaaacattcacaccctcggagcagtgttctggaatcctataaagggacaaacactcagaacccagcagccgtgttctggaaccatatgtgagggacaaacactgagaacacagcaggattgttttggaatgctatgtgatggagaaacattcaggcactcgtagcagtgttctggaatc

SEQ ID NO: 5631 - DNA, 136 bp, Protomyxzoa rheumatica
aatctaagggccaaacataaactgcaaccagaatgtaagacttaatgaaatcattttctcaagaattttgcagaagagtctccatagaagaattaacaagaaattagtcactacaatatacagacattggtgaata

SEQ ID NO: 5632 - DNA, 198 bp, Protomyxzoa rheumatica
acacagccccacatcttttcccagtgacgcatactgtttttgatcctgatacatactgggattgtagtcctgcagccctatgacaaaaggtctgagaggctttatgaaactacatttcccaagaagcgcagcgaggtgcgcagaaccttcccatccttatccagtgaaggggaatgtccgtgagccccaagcatgctg

SEQ ID NO: 5633 - DNA, 127 bp, Protomyxzoa rheumatica
ccatgatcgtacttgtagcattaagcccggtgtgagagtcaacatcattacaattaactaggtcaggataggagagtcctcccttgcctatgagctgagtttagatgtgggccaccatttcaactct

SEQ ID NO: 5634 - DNA, 164 bp, Protomyxzoa rheumatica
ctgttgtataagctctgcctataggggaattgtgagagatcgtgccactgatcacccaagtgatgtaactatctattgtctaggattttcctacagagggctttgtgacataccttttcactggtcacccaggtgacgttactcatctaagctctgcctacagg

SEQ ID NO: 5635 - DNA, 137 bp, Protomyxzoa rheumatica
taatgtcttttagtagtactttagtcatttctcgtgcttttctgtcttggtggggaatgcctcaacctatcctgaaaaagtgcaaataaacactagcataaacggatagcctctggcacggggcattttggtaaagt

SEQ ID NO: 5636 - DNA, 282 bp, Protomyxzoa rheumatica
gcaccttggaggaaccagatactgatctgatcaggctagcaggagctgaaagatgtgaggactaaaacagaccatgctccttctcattaggcctccaagagcccatcgtcacttgagaagttgaaagcagcaagattctgctgtatctagattataaatttctcactgatggctaagccattatatgaaattacaaaaaaagaaaaagagagagagaaaaaaagaacccctcctctaagaaactgaacaggagaaggagccatgccttcgtgccttgtgaaa

SEQ ID NO: 5637 - DNA, 124 bp, Protomyxzoa rheumatica
aagaaagcttcaactttgtgagttgaatgtacacatcacaaagaagattctgagaatgattctgtctagcttatatgtgaagatattcccgattacaacgaaggcctcaaagcagtccaaatat

SEQ ID NO: 5638 - DNA, 538 bp, Protomyxzoa rheumatica
gaaacttctttgtgatgtgtgcattcatctcacagtgttgaaactttcttttgattgagggttttgaaacagtctttttgataaatctgcaagtggatatttggagcgaattgtggcctatggtttaaaaggaaatatcttcacataaaagctagacagaagctttctgagaaacttctttgtgatatgtgcgttcatctcaccgggttgaatctttcctttcatcgagcaatattgaaacacccttttttttgaatctgaaatagatatttggagcgattgtgtcctatggtagtaaaggcaatattttcacagaaaaactagacagaagcattctgcaaaacttcctcgtgatgtgttcatttatctcaccaaattgaaccattcttttccttgagcagatttgatacactctttttgtagaatgtgcaagtgaatatttggaacgctttgatgagtttgacggaaaaggaaataccttcacatataaacgagacagaagcattctgagaaacttctttctgatatgtgcattcaa

SEQ ID NO: 5639 - DNA, 132 bp, Protomyxzoa rheumatica
cctgctgtggtctgaatgtttgtccctcacttgggattctaggacactgctgttgggttctgagtgtttgtcccttatgtaagattccagaacactgttccgtgggtttaaatgtttatccctcacatagga

SEQ ID NO: 5640 - DNA, 284 bp, Protomyxzoa rheumatica
tctgaacggaatggactggaaaagaacggaatcaaatttaatggattgcaatgtatttgattcgaatgtaatggaatccaaattgaatataatcaaatggaatttaatggaatgcaaaggaatggaatagaatggaaagcaggggaaataaatggagtggaatcgattctaatggaatcgaaaggaaaggagttgaatggaatagattcaaatggaatggactcaaatgaaatagaattgagtcgagtggcatcaaatggaatggaatggaaaggaacggaata

SEQ ID NO: 5641 - DNA, 153 bp, Protomyxzoa rheumatica
cgcgccactgcactccaacctggggacagagcgagactccatcgcaaaaagaaaaggaagaaaagtaaggaactttcatcattaatatataactaatatgacaaaaatgtggtttacgtttttatctttgcaagatttaggaacatttagtgg

SEQ ID NO: 5642 - DNA, 130 bp, Protomyxzoa rheumatica
ttaattaattcagcaggttggaaaaactctttttggagaatctatgaagtgacgtcttggagcccattgaggcctaggaagaaaattgaatatccctagataaaaactagaaagaaggtatctgtgaaac

SEQ ID NO: 5643 - DNA, 141 bp, Protomyxzoa rheumatica
ttgtttatttagggcactttgaggtatacagtagaaaaggaaatatcttcacataaaaacgagacagaaacattgtcagaaactgctttgtgatatttacattcaactctcaaagttgaaaattcctcttgatagagcagt

SEQ ID NO: 5644 - DNA, 187 bp, Protomyxzoa rheumatica
gctccatcaaaagaaatgttaaaccctgtaagcggaatgctcacatcacaaaacagtttcttacaatgattctgtctagtctttctatgaagatacttccttatctagcagtcctccaaacgcaaaaaatatccagttggaaattctgcaaaaagagtatttcaaaactgctctatcaaaaggaagg

SEQ ID NO: 5645 - DNA, 250 bp, Protomyxzoa rheumatica
tatatgaagatattcccctttctaaaataggcccaaaagcgctccaaatgtctgcttgcaggttctacataaagagtgtttccaaactgctcaatcaaaagaaatgttcaactccgtgagattaacgcacgcatcacaaagtagtttctcaaaattcttctgactagttttcatgtgaagatttttgcttttcctccacaggcctcaaagtgctccaaatgtccacttgcagatgctacaaaaagagtgt

SEQ ID NO: 5646 - DNA, 221 bp, Protomyxzoa rheumatica
aaaaaggttgagaatggttaaaaggtaaatgttccttctacattttgaatttatagaaataatgacacagtagccagttgctgaaacgctacccagttcagagtaaaacaaatttcctattttatcaaatcattgaatgccatttaaaattcataatacttgcagagatcccaaatatcttaataaagatgaaagcctaagatcacattggtggcctagac

SEQ ID NO: 5647 - DNA, 126 bp, Protomyxzoa rheumatica
tccagaagagttgaaacactctttttgtagaatctgcaaagggacacttttaggtcccttaagtcctatgaaggaaagagaaaatccacagataaaaactgaaaagaagctatctggtaaactgct

SEQ ID NO: 5648 - DNA, 123 bp, Protomyxzoa rheumatica
attcctttctattcgagtccattcctttctattgtattcgagtcatttccattccattacattcgattgtattccattccttgccattccatttcactcgagccgtttccattgcattccatt

SEQ ID NO: 5649 - DNA, 158 bp, Protomyxzoa rheumatica
tttgggagctctttgaggccagtgttgtaaaagttaatatagcaggataaaaactacaccaatgacatatgagaaacagctatgtgatgtgtgcattcatctcacagattgaaaccaacttttcattcagcagtttcgaaagactgtttttttagaat

SEQ ID NO: 5650 - DNA, 257 bp, Protomyxzoa rheumatica
caattggaacggattctaatagaatggaatcgattggaatggaaccgaaaggaatggaatagaatggcatcgattggaaccgaatggaatgcagtgaaatggagggcagtggtgtggaatggaggggaatggaaaggggtgaaatggaagtgaatagagtggagttgagttgagtgtaaagcagtgcaatggaatggaatgtgaaggaatggaattgaacatagtggagtggattggagtggagtggaatggaatgc

SEQ ID NO: 5651 - DNA, 349 bp, Protomyxzoa rheumatica
taagcagtgctccagaagccagcagatgccatcaatcggttttacatccaccaggcaccgagaatctttggacaccagaagtgtcctctgttgccagagctgaactctcaactgaagactccagaaggccctgaaatgagggcagtcttccatcattgcctgtctgtagccacgaggacacagtctctttccatggctggtgagatgtccagcactcctggggctctggaaagcccctttccaactttaggccttaggtgagctctccattttcctcaggccaggcagtgcacattatgggggacactgctggatgttgggatgaggatggcacttggcatgtgagcta

SEQ ID NO: 5652 - DNA, 207 bp, Protomyxzoa rheumatica
tcacaaagaagtttctcagaatccttctgtgtagtttttatgtgaaggtatattcctttccaccataggcctcagagcgctccatatatccacttgcagattctgcgaaaagagtgtctcaaaactgctcaaacaatagaaactttaacaccatgagatgaatgcatacattacaaagaagtttctcagaatgcttctgtgtagttt

SEQ ID NO: 5653 - DNA, 134 bp, Protomyxzoa rheumatica
ttccattccattccattccattcgatatcttgtaattcactccctacttttccattccattcgttgccattccatgctattctattccatccgagttcattcctttcaaatccattcaattccactccattcga

SEQ ID NO: 5654 - DNA, 147 bp, Protomyxzoa rheumatica
ccagatccctgctgctgggttctgaatgtatctccctcacatagaattccagaacactgcgacgagagcctgaatgtttctccataaagtagtattccggaacactctcgctgtagtttgaatgtttgtccttcacataggattcca

SEQ ID NO: 5655 - DNA, 267 bp, Protomyxzoa rheumatica
aattgaatggaatggactggactcgaatggaaaggaatggaatcgaatggattggaatggaatggagtcgaatgaaatggaatggaattgaatgatctcgaatggaaaggaatggatttgaatgtactcgaaagtaaaggaatgcacttgaatggaaaggaatgcactcgaatagaatggaattaactcgaatggattggaatgtaatggaatagactcgaatgcaattgaatgcaatggaaaggagtggaatggaatggaatggaa

SEQ ID NO: 5656 - DNA, 179 bp, Protomyxzoa rheumatica
cacagctgggatttttctggatccctacgtgtgggacaaacattcagaccctcatagcattgttctgaaatcctatttgaggaagaacattcagaatacagcagtagtgtcctggagacctacgtgcgggacaaacatacagaccctcgtagcagtgttctggaatcctatgtgaggga

SEQ ID NO: 5657 - DNA, 144 bp, Protomyxzoa rheumatica
tagatgaatgcactcatcacaaaacagtttctgagaaagcttctgtgtagtttttctgcgaagatatttcgtttataatgaaagcctcaaagagctccaaatatccagaagcagataattcaaaaggagtgtttcaaaactgtt

SEQ ID NO: 5658 - DNA, 167 bp, Protomyxzoa rheumatica
agggacaaacattcagaccctcgtagcagtgtactggaatcgttcgtgagagacaaacactcataacccaacagcagtgttctgggatcctaagtaagggacaaatattcagaccatagcaagagtgttctggaatcctacgtgatggagaataattcagaacctcg

SEQ ID NO: 5659 - DNA, 127 bp, Protomyxzoa rheumatica
cagaatcattctcagaaactaatttgtgatgttggcattcaggttacagagtttaacctttcacttgacagagcagttttgaacactctttttgtggaatttgcaagtttatattgagagggctttg

SEQ ID NO: 5660 - DNA, 131 bp, Protomyxzoa rheumatica
cacagaaagagtgtttcaaacctgctctatcaaaaggaatgttcaactctctaacttgaaagcaatcattacaaggaagttactgagaatctttctgtgtagattttatatgaagatattcccgtttccaa

SEQ ID NO: 5661 - DNA, 135 bp, Protomyxzoa rheumatica
tgatgcaactcttctctatgctctgcctacagggggcattttgacatatctcttcactgatcacccaggtgatgtaacccttttctagtctctgcctacagaggtcgttttgacatcacactgcagggatcactc

SEQ ID NO: 5662 - DNA, 222 bp, Protomyxzoa rheumatica
ctcaaagtgctccaaatatccactggctgattctccgaaaagagcatttcaaaactgctcaatcaaaagaaattttcaatctgtgagatgaatgtgcacatcacaaagaagtttgtcagaatgcttccgtgtagcttttatgtgaatttattcccttttccacaataggcctcaagtggctccaaatgtccacttgcagattctacaaaaagagagtttcaa

SEQ ID NO: 5663 - DNA, 124 bp, Protomyxzoa rheumatica
gctccaaatatccacttgcagttaacaccaaaagactgttccaaaactgctctctgaaaagaaatgttcaactctgtgagttgatcgcactcatcacatagcagattctgagaatgcctctgtc

SEQ ID NO: 5664 - DNA, 131 bp, Protomyxzoa rheumatica
atggaatgaactcaaatggaatggaatggaatagaatagactagaatataatggaatggaaatggctcgaaaggaatggaattgattcgagtggaatagaatggacatgaaaggaatagaatggaatggac

SEQ ID NO: 5665 - DNA, 238 bp, Protomyxzoa rheumatica
tccattgcattcgattccaatccactccagtccattcccttcaagtccattccattccagtccattcctttcgagtccattccaagcaattccattcgatgtttttccattacactcctttccattctctatctttagattccattcagttccattccattcaattcaactgcagtcaattaaattccatttgacaccattccattcgagttcattccactccagtccattccattcg

SEQ ID NO: 5666 - DNA, 124 bp, Protomyxzoa rheumatica
ggatcaagaattcccttatggatgtgtgatagttgagttgtctattagtcttccaagtggtgataatcagcagataattagatatgagtctaaattttagaggagaggtaggagctggaaatat

SEQ ID NO: 5667 - DNA, 131 bp, Protomyxzoa rheumatica
ttctcagaatgattccctctaatttttatgtgaagataattctttttcaccataggcatcaaacggctcaaaaatatctctttgcagattgtacaaaaggatggtttccaatctgctcaatcaaaagaaag

SEQ ID NO: 5668 - DNA, 140 bp, Protomyxzoa rheumatica
atttggaccgctttgatgccttcgttggaaacggaaatatcttcacgtaaaaactagaaacaagcatcctcagacacttctttgtgatgtgtgcattcaacacacagagttgaacctttcttttgatagagcagttttga

SEQ ID NO: 5669 - DNA, 124 bp, Protomyxzoa rheumatica
tcatttcctttatttcatctgaatctcagtctgtcaaccagactggagtgcagtggcactatcttagcacacattacatttcaccattctattccattccattccattcaaatccactccattc

SEQ ID NO: 5670 - DNA, 209 bp, Protomyxzoa rheumatica
aatgcattggaatggactggaatgtaatgaactcgaatggaatggacacgaatggattgaaattgaaagcaatggatgcgaatggaatggaatcgaattgaattgaatggaatgaaatggaatggaatagattataatgtaaaagaatagaatggaatggaatggaattgagaggactcgaatcaaatggactcaaagggaatggaata

SEQ ID NO: 5671 - DNA, 178 bp, Protomyxzoa rheumatica
tgaacattacttttgattgagcagtttggaaaatttctttttgtagaatctgcaagtggacatttggagcactttgagccctatgatagaaaaggaaatatgttcacataactagacagaagcattctgacaaccttctttgtgatgtgtgcattcatctaacagagatgaaccttac

SEQ ID NO: 5672 - DNA, 148 bp, Protomyxzoa rheumatica
atattttttatgttaagatatttccttttccacaataggccacaaaggaatccaaatatccccttcaaattctacaaaaagagagtttcaaaactgctctatcaaaaaatatgttcaactctgagagttgaatgcacacatcacaaag

SEQ ID NO: 5673 - DNA, 316 bp, Protomyxzoa rheumatica
tggaatggaaaggaatagaatggaatggaatcggatggaatggaatggaatggagtcgaatggaatagaaccgaatggaatggaatcgaatgtattggaatggagtggaatggaacagaatttaatggactgtaatagaatggaatctaatgcaatggattgcaatgtaattgattcatatggaatggaatcgaatggaatgtaatcaaaaggaatggaatggaaagcaatggaatggaatagaatggacagcaaaggactgccacagagtggaatcgagaggaatggaatggaatggaatggaatggaatggaat

SEQ ID NO: 5674 - DNA, 187 bp, Protomyxzoa rheumatica
tttaatacagtggaattgaatggactgttacggaatgtaatggagtcgaatggagtggatgggagtggagtgaaatgaaatggaatggagtggagtgtaatgcaatggagtggaatgtagcggagttgagtggattgtaatggaatggagtggaattgaatgtcattgagtggaaacaatgaaatga

SEQ ID NO: 5675 - DNA, 294 bp, Protomyxzoa rheumatica
tccattccattccataccattcctttcctttctttccaaagtatttcactctgtcacagaggctagagtgaagtggcacaatctcagctcacatttcttttcaccattcaattacattccactccatcccattccagtcgactccattgcactaaactccattccactccactcaaatccattccattccattccataacatttcactctattgcattccatagcttcctttccactgtatatcactgtgtcacccaggcttgagtgcagtggcactatctcagctcatattac

SEQ ID NO: 5676 - DNA, 210 bp, Protomyxzoa rheumatica
cattaaatggattctaatagaattatcaaatggactcgaacggaatcatcgaatgctctccaatggaatcatcatcgaaggaatcaaatggaatcatcaaatggaattgaatgcagtcatcattgaatggaatcgagtggaatcatctttgaatagaatcgaatggaatcattgaatggaagcaaatggaatcatcgtcgaatgtaatcg

SEQ ID NO: 5677 - DNA, 149 bp, Protomyxzoa rheumatica
tgtaggcaaagccaaggcaagagttacgtcacctttgtcatcagttcagggaaacgtgaaaacgcccctgtaggcagagcctagaaactatttacaacacctagttgatcagtgcagagatatctcacaataccccctgtaggcagatc

SEQ ID NO: 5678 - DNA, 182 bp, Protomyxzoa rheumatica
tgttcacataaaaactagacagaataatactgagaaacttctttgtgatttgtgcattcatctcactgagttgagcctttcttttgattgaccagtttggaaacaatctttttgtagactctgcaagtggacatttggagcacattgcatcctgtggttgacaaggaaatattttcacataa

SEQ ID NO: 5679 - DNA, 132 bp, Protomyxzoa rheumatica
agttgaatgtttcttttgacagagcagtgttgaaactctcttttgtagcatctgcatgtggacatttggagcacgtgagggctatcgtggaaaaggaaagatcttcacataaaaactagacagaagcattct

SEQ ID NO: 5680 - DNA, 138 bp, Protomyxzoa rheumatica
cattttatagtatctggaagtggacatttggatcgctttgaggcctatggtgaaacaggaaatatcttcccctaaaatctagacagaggaattctccgaaacttgtttgggatgtgtgaactcaactaacagtgttga

SEQ ID NO: 5681 - DNA, 149 bp, Protomyxzoa rheumatica
cattccattatagtccattccattaaattccaatatattccatttgcgtccggtccactccattccattcaattcgttgcctttccattcctttggagttcatttctttccattccttttgaaatcattccattccttcccattctatt

SEQ ID NO: 5682 - DNA, 179 bp, Protomyxzoa rheumatica
acatcctatgtgtctgtatttcttttccagcagggactggaagtcctaagttttgttaatatggtgagccagtgcccacatgaacagtagcatcttagcactgccaccaggacatcaatttaaatgctcttttcttagttagtcaaagtgtggtctatgagtttgcattttaataagct

SEQ ID NO: 5683 - DNA, 163 bp, Protomyxzoa rheumatica
ttgtgaaatatctctgcactgatcacccaggtgattcaacacttgtctaggatctgccttcaggtggtattgtgaaatatctctgcactgatcaacaaggtgatgtaactcttgtctaggctcttcctacaggggcgttttcacatatacctgaactgatgac

SEQ ID NO: 5684 - DNA, 151 bp, Protomyxzoa rheumatica
gttacatcacaatgccccctgtaggcagagcatagagaagagtcgcatcacctgggtgatcagtgcagatatatgtcacagtaacccctgtaggcagagcatagagaagagttccatcacctgggtgatcagtgcagagatatgtcacaat

SEQ ID NO: 5685 - DNA, 161 bp, Protomyxzoa rheumatica
acctgactgccacactgctttgccaaagggaccaggctcctcggcacaggagctgaggttctacaggcacagagaaaacactgtctgaacgttggaatggagtcgggagcggaaaaaagaatgtttgttctcaatgcttacacttaccaattgtttccttt

SEQ ID NO: 5686 - DNA, 181 bp, Protomyxzoa rheumatica
agtggagtggaattgagtgtagtggcacagcatggaatggaaaggaaaggaatacgatggaatggtgaaatgaaatgtgagctgagattgtgtccctgtattccagccttttttgacagagagatatcccatcgaaagaaaggaatggaatggaatggggtggaatggaatggggtggaat

SEQ ID NO: 5687 - DNA, 345 bp, Protomyxzoa rheumatica
tggttaaatatagcagataagaccggcctggatccagccatgtgcagcagcttatcgcgaaacatatgtagcctgagctcagccaagagtgaaagtaagagcagcttcactggcagacacagagttaaagaattcccaaagagagcaagaaaagtcagttttgcaggagctgccagaaagaacagagattcgtcctccacatgtcccagcctacccccctttactgagtccaacagccccccaggagccagacttaagagccagcatgccccaagtttcaccccaaaggggaggatcagagccttgagaggccagggaaggaattcaagatagtcaagcaggctg

SEQ ID NO: 5688 - DNA, 124 bp, Protomyxzoa rheumatica
atcaactcgagtggaatgcaatggaatggaatgtaatgtagtggagtgcaatcggatttcattgaaaggaatggaaacaacacgagtagaaaggaaaggaattgaatggaatggaatggaatgg

SEQ ID NO: 5689 - DNA, 176 bp, Protomyxzoa rheumatica
ctttcttttggttgagcagttttgaaacacactttttgtagaatctgaaggtggatatttggaacactttggggcctacggtataaaaggaaatatcttcacataaaaactcgacagagcattctgagaaacaactttgtgatgcgtgctttcatctcacagagttgaacgtttct

SEQ ID NO: 5690 - DNA, 129 bp, Protomyxzoa rheumatica
tgagttcaacgcacacatcacaaagtagtttctgaaaatcattcggtctagtatttctattaagataattccttttataccaaaggcctgaaatggcgctcaaaatccactttgaaattctacaaaatg

SEQ ID NO: 5691 - DNA, 193 bp, Protomyxzoa rheumatica
ctgagctgtgaacctcccaccccccacaaattcatgtgttgaaaccctaccccccaatgtgttatattttggaaacaggaattttaaggatataattaatgttaaatgatgttgtaaggattggaccctaatctaataggactggtgtccttataagaataagaacagacaccagcaaactctatctcattct

SEQ ID NO: 5692 - DNA, 123 bp, Protomyxzoa rheumatica
caaaagaaaagttcaactctgttagttgagtacacatcaggaacaagtttctgagaatgcttcagtctagattttatgggaagaatttttatttttcaccataggcctcaaagcgctccaaat

SEQ ID NO: 5693 - DNA, 157 bp, Protomyxzoa rheumatica
acttgaacctttctttcgatagaggagttttgaaacacactttttgtagaatcagcaagtgttcatttggagctctttcttgtcttggtggaaaaaagaatatcttcacataaaaactagacataagcattatcagaaactcctttctgatgtgtgt

SEQ ID NO: 5694 - DNA, 309 bp, Protomyxzoa rheumatica
gaatggaatggaatggtatggaatggtatggaatggaatggaatggaatggaattaaatggttaaatgaaatgtgagctgagtttgtgccactgcacgccagcctggatgacagagtgagatcctgttgaaagaatggtatggaatggaatttagtggagtggagatgcatggattgatgtggagtggaatggaatgggatggaatttaatggaatggagtgcagtggagtggagtggagtggagcagaatggagtggaatggagtggaatggaatggaatggtgtggagtggaatggagtgggatgga

SEQ ID NO: 5695 - DNA, 135 bp, Protomyxzoa rheumatica
attatatactgtacataaagtatcaaaaggtacaccaaatacatactatatactgtacataatatatcaaagttcaaaaaatacatattatattgtgttcataaaatatcaagtacacaaaatacatattatata

SEQ ID NO: 5696 - DNA, 159 bp, Protomyxzoa rheumatica
ggggtgttctggaatcctacgtgtagaacaagcattcagaacctcgtaccattgttctggaatcctctgttaggaaaatacattcagaacacagaaggagtgttctggagtcctatgtgcaggacaaatattcagaccctcgtagctgtgttctgtaat

SEQ ID NO: 5697 - DNA, 130 bp, Protomyxzoa rheumatica
ttatttaaagatattcccttttccaccataggccaataaggtctctaaatatccggttgaagattctacgaaaacattcaaagctgatccatcaagagattggttaaactctgtgagctgaatgcacata

SEQ ID NO: 5698 - DNA, 154 bp, Protomyxzoa rheumatica
cagttctaaaataatagttgaagatgttaatactccactctgagtaatgaatagaaaaatgagatgaatgacaaattaggaaatagaggacttgactaactcaatgaactaaattgatctaacagatatatacaatatactccatccaacaaaa

SEQ ID NO: 5699 - DNA, 159 bp, Protomyxzoa rheumatica
actttctattgactgagtagttttgaaacactattgtgtagaatctggaagtggatatttcaagggctttgaggtcaattttggaaaaggaaatatcttcagataaaactacacagaagtattccagcaaacttcgttgttatgtgtgcattcaactca

SEQ ID NO: 5700 - DNA, 168 bp, Protomyxzoa rheumatica
gaggtgatgcaactcttctctatgctcagcctacaggggacattgtgacacatttctgcactgatcacccaggtgatgtaaatcttttctaggatctgcctacagggtgcttggtgacatatccttgtaatgatcacccaggtgatataacacttgtcaaggctctgc

SEQ ID NO: 5701 - DNA, 137 bp, Protomyxzoa rheumatica
tatgggaagatgtgtctttttccaccataggcctgaaagtgccccaaatatccacttatagattgtacaaaaagactgtttcaaaactgctcaatcaaaagaaaagttaaactctgtgagatgaaagcacacatcag

SEQ ID NO: 5702 - DNA, 303 bp, Protomyxzoa rheumatica
tctgatgaaggaagggatgggagcagccagctggctgagctagtagccatcttcccagctattcagaagaaggccagagggatttgacacttgtataccaactcttggtcagtagcaaatggtcttactacctagatgcctcagtggcaatgaggcaaatggttaattgggaataaagaggtttggggaaagaatacagggaagatatctgaatccctgtgcaccctaccattaacactgttatgttgatgctcatgcatctctgctttctcttggcagactaattaatcagcaggcaggtca

SEQ ID NO: 5703 - DNA, 159 bp, Protomyxzoa rheumatica
ccccagcaacagtgttctggaatcctatgtgaaggaaagtcattcagacactcgtaccagtgttctggaattctgtgtgagggacaaacattctgatgcccgtagcagtgttctgtagtcctgtgtgagggaaaaacattgagaccacagcaggagtgt

SEQ ID NO: 5704 - DNA, 161 bp, Protomyxzoa rheumatica
aaagcttttttttttgaatgagcagtattgaaactctctttttgtagtatatgcaagtggacatttggagctttttgaggcctattttggaaaaggtaatatcttcacataaaaactagacagaagaattctgacaaagttcttggcgatgtgtgcattca

SEQ ID NO: 5705 - DNA, 134 bp, Protomyxzoa rheumatica
cttttccaccataggcctcaaatccctccaaatatccacttgcagatctacaaaagaactgattcaaaactgctctatcaaaaggaaagttcaattctgtgagttgattacacacatcacaaagaactttctga

SEQ ID NO: 5706 - DNA, 313 bp, Protomyxzoa rheumatica
gaaacactctttttgtagaatctgcaagtggatatttggacagctttgaggcctattggggaaaaggaaatatcttcacataaaaactacacgtaggcattctgagaaacttctttatgatgtgtacattcattacacagattttaacatttttttgattgagcagatttgaaacgctctttttgtagaatctgcaggtggatacttgcagggctttgaggcctattttggaaaaggaaatatttttacataaagactacacagaagcattctgagaaacatctttgtgatatgtgcattcagctcacagagt

SEQ ID NO: 5707 - DNA, 205 bp, Protomyxzoa rheumatica
gcattctgagaaacttctttgtaaattgtgctttcctctcacagagtagaatctatcttaccacagagttgaaccattcttttgattgagcagctttgaatctatctttttgtagaatccaccagtggatatttggagcgctttgaggcctacagtggaaaagaaaatatattcatataaaaactacgcagaaggattcagagaa

SEQ ID NO: 5708 - DNA, 130 bp, Protomyxzoa rheumatica
tttgtagaatctgcaagtggatatttggatagctttgagtcttcgttggaaaaggggatatcttcacataaaactagagagaaggactcccggaaaaatctttgtgatgtttgcattcaactcacagagt

SEQ ID NO: 5709 - DNA, 223 bp, Protomyxzoa rheumatica
aagggctccaaatatccacttgcagattctattaaaagagtgtttccaaactgctcaatataatgaaagtttcaatactgtgagatgaatgctcacatcaaaaagaagttcctgagaatgcttctgtgtattttttatgtgaagatatttccttttcaacaataggcctcaaagcgctccaattatacacttgcagattctacaaaaagagtgtttcaaaact

SEQ ID NO: 5710 - DNA, 148 bp, Protomyxzoa rheumatica
ggactcttgtcacacaggctgtagcgcagtggcacaatctcaacacctatttccttccattctattccattcaacaccattccactccactcgacttcactccactccattccactacattccattccattccactccattccagtaa

SEQ ID NO: 5711 - DNA, 488 bp, Protomyxzoa rheumatica
agagtctcatcacctgggtgatcagtgcagagttatgtcacaatgctccttttggcagagcctagacaaatgttacatcacctgggagatcagggcagagatatgtcacaatgccacctgtaagcagatcccagacactagtggcataacctcggtgatcagtgcagagatatgtctcaaaacaccctgtcggggaagcctatacaagagttacataatatcggtgatcggtgcagtgatatgttaacatgcccctgaaggcagagcctagacaagagttacatcacctgggtgatccgtgcagagatatctcacaataaccctgtaagcagagccaagacagcggttacatcacctgcgagataagtgcagagatatgtcataaatctcaaagaaggcaaagcctagacaagttttacatcacctcagcgagcagtgcagcgatatttcccaatgtccctctaggcagagcttagacaagagtcaca

SEQ ID NO: 5712 - DNA, 149 bp, Protomyxzoa rheumatica
ttctggaatcccctgtgagggacaaacattcagactgtcgtaggggtgttctgcaatcctatgtgacgaacaaacatatagaatccagcagcattgttctggaatcctatgtaggagacaaacattcagacaatagtagcagtgttctg

SEQ ID NO: 5713 - DNA, 131 bp, Protomyxzoa rheumatica
ctcacaaatacccctctggacattctacaaaatgactgcttccaaactgctgaatcagtagaaactttcaactctgttagatgaatgcccacaacacaaagaagtttctcagaattattctatctagtttt

SEQ ID NO: 5714 - DNA, 144 bp, Protomyxzoa rheumatica
tgatgtgtggattcatctcagagactttaccttttcttttgattcagcaaggtggaaagactctttttgtgaatctgtgaagggacatttgggaacctatccaggattatggaaaaaaacagaatatccacaggaaaaaaaaaa

SEQ ID NO: 5715 - DNA, 165 bp, Protomyxzoa rheumatica
ttctaaatccattctattccattcctttctttccgcaggatctcactctctcacccaggatggagtgcagtgcacaatctcagctcacatttcaattcgccattccatgccattctattccatttcattccattccattccattccactccattgcattccattc

SEQ ID NO: 5716 - DNA, 140 bp, Protomyxzoa rheumatica
agcagctttgaaacacttttttggtagaccctgcaagtggacatttggagtgctatgaggtctatggtggaaaagtaaatatcttaacataaaatctctacagaaacattctgagaaacttctttgtgatgtatgcattc

SEQ ID NO: 5717 - DNA, 330 bp, Protomyxzoa rheumatica
atcacaaagaagtttctcagaatgcttctgtgtagtttttgtgtgaagacatttcattttccacagtatgcctcaaagcgctccaaatatccactctcagattctgtaaaaagagagattccaaactgctgaatcaaaagataggttcaacactgtgacttaggtgcacaattcacaaagatgttcctcagaaatcttctgtgtagtttttatatgaagatatctcctcctccaaaacagatctcaaagccctccaaatattcacttccagattgtacggaaagattgtgtcaaaactgctaaatcaaaacaaaggttcaactctgtgat

SEQ ID NO: 5718 - DNA, 142 bp, Protomyxzoa rheumatica
gttcagctacgtgaattgaatgcaaatatcacgtagtagtttctgacaaagattctttctagtttttatgttaagataattccttttctaccgaatgccacaaagcgctctaaataaatacttgcaaattccacaaaaactg

SEQ ID NO: 5719 - DNA, 143 bp, Protomyxzoa rheumatica
ctaccgttggacatttgcggcacttcaagccaatggtagaaaaggaaataccttcacatagaaagtagatagagccagtcttacaaacttctttgtgatgtgtgcattcatctcacagtattgaacctttcttttgattgagc

SEQ ID NO: 5720 - DNA, 162 bp, Protomyxzoa rheumatica
catcacaaagaagtttctctgcatgcctctgagtagttttatttgaagatatttccttttcctccataaggcactaagggctccaaatatccacgtgcagattctaacaaaagataaattcaaaactgctcaatcaaaatataggttcaactctgtgagttg

SEQ ID NO: 5721 - DNA, 153 bp, Protomyxzoa rheumatica
tctctgcactgatcccaaggtgatccaactgttgtctgggctctgcctactgggggcattgtgacatatctctgcactgatctcccacgtgatgtaacttttctctaagctcgggctacatggcattgtgacatatcactgcactgatcaccc

SEQ ID NO: 5722 - DNA, 145 bp, Protomyxzoa rheumatica
cctttagtttctaatcgggttgattccaatccattccattgtattcaagtccgtttcattccatgccattccatttgggttgtttccattttgttgtattccattccattcaattccattgcattccattccactcgggttgttt

SEQ ID NO: 5723 - DNA, 311 bp, Protomyxzoa rheumatica
atatctctgcactgatcacccagtttatgtaactcttctctaggctctgcctataggggcattttcacatatcactgcactgatcaacgagattatgtaacttttgtataggctttgctgacagggggcattgagacatatctctgcactgatcactgaggtgatgcaactcttctctgggatctgcttacagggggcattgtgacatatctcttccttgatcatccaggtgatgtaactcttgtctaggctcagcctactcgaggaattgtgagatatctccgcactgatcacccaggtgatgtcacttt

SEQ ID NO: 5724 - DNA, 128 bp, Protomyxzoa rheumatica
tcattggaatccatgtgtcttgagtccattccacccaagtccattccattcgagtccactccactcgagtccattccattctagtccatttgactcgagtccattcaactcgagtccattccattcaa

SEQ ID NO: 5725 - DNA, 171 bp, Protomyxzoa rheumatica
ttccatttgggtccgttagatgattccattcgattccattcgattatgagtccattttattccattcagtgatgattccattttggtccctttgatgattccattcgattcaatttgatgatgactccaatcaattcctttagatgattccataggaatccattcggtcat

SEQ ID NO: 5726 - DNA, 135 bp, Protomyxzoa rheumatica
aaacctgtgagatgaagacacacataaagcagtttctcagaatgcttctttgtcatttttatctgaaaacattttctatttcaccataggccacaaaactctccaaaataactctctgcagattctacaaaaaca

SEQ ID NO: 5727 - DNA, 292 bp, Protomyxzoa rheumatica
aactgctttgtgttgtgtgcattcatctcacagagttaaagcttcctttggattcaacagtttggaaggagagtttttgtcctttctgcgaatggatatttcagagctcttttgggctaatggccaaaaagtgaatattcctgaataaaaactagatggaatctatctgagaaactgctgtgtcatgtgagcattcatttcacagagttaaagcattcttttcattcagctgtttggaagcagtgtttttgtagaatactcaaagggctattttggagagcattgaggccta

SEQ ID NO: 5728 - DNA, 206 bp, Protomyxzoa rheumatica
tccagaacactgctgctatgctctgaatgtatgtccctcacataggattccagaacactcctgctgggttctgaatgtttgtccctcacttagcattccagaacaatgttacaaaggtctcaatgtttgtcccacaggtagaattccagaatacctcagctgtgacatgaatgattgaccctcatataggattccagaacactgct

SEQ ID NO: 5729 - DNA, 149 bp, Protomyxzoa rheumatica
catatcagggcaaatatttagacacacatagtagtgttctggaatcgtatgtgagagacaaacactcgcaacccaacagcagtgttctggaatcctaagtgagggacaagcattgagaccacagaaggagtgttctgaaatcctatgta

SEQ ID NO: 5730 - DNA, 229 bp, Protomyxzoa rheumatica
cagaataattctcagaaacttctttgtgctgtgtgctttcaactcacagaattgaactttccttttaatagagcgattttgaaactcacattttgtaggatttcgaagtggatattgagtgccatttcaggcctatgttataaaggaaatatcttaatagaaatactagaccgaatgatgctcagaaactaatttgtgatatgtgggttcaactcaccgagtttaaact

SEQ ID NO: 5731 - DNA, 148 bp, Protomyxzoa rheumatica
tgtgatgtttgcattcatctcacagacttgaacattcctctttatagagctgttttgaaacagtcttttcgaaaatttgccagtggatattcggaccaccttgaggacttctttggaaacgagttttcttcatataaaactagagaga

SEQ ID NO: 5732 - DNA, 136 bp, Protomyxzoa rheumatica
cttcgaaatgaccaaaatgggaaaagaagttagtaggcaaagagtataaatgaaccacaagatggatagcctccctctgaacaatggaaaaataatttttctttctagaaggcacagaaaagaggcctgtagggtg

SEQ ID NO: 5733 - DNA, 133 bp, Protomyxzoa rheumatica
aatggcatcaaatggaatggaatggaatggacccaaatgtaatggatttgaatggaatggactcaaataaactggactcgaacggaatggtctagaatggaatttactcgaatagaatggaatagaatggatt

SEQ ID NO: 5734 - DNA, 279 bp, Protomyxzoa rheumatica
ttccattccatttcattctagtccttttcattccattccattccattccaatccattcctgtaaattccattcctttccattccattccactggtgtttattccattccactctattccattgcattccattccactgttgattattccattccactccattccattgcattccattccattccatttcattcttttccactccactctggttgactcaattccatacctttgcattccagtgcattccattactttcctttccattccattgctttcc

SEQ ID NO: 5735 - DNA, 262 bp, Protomyxzoa rheumatica
aaaggacaaacattcagatgccagcagcatttttctggaatcctttgtgagggacaaacattcagaccccagcagcagtgttcttgaatgttatgtgagggacaaacattcacaccacagctggagtgttctgggatcctatgtaagggagaagcattcagacactcatagctgttttctggaatcctatgtgatggacaaacattcagacccacgtagcagtgttccagaatcctacgtaagggaaaaacattcagacccc

SEQ ID NO: 5736 - DNA, 131 bp, Protomyxzoa rheumatica
agaatctgcaagtggatatttgtagcgctttgtggcatgaggtagaaaaggaaatatcttcacctaaagtctaaacagaagcaaccttagaaacttatttgcaatgtatgcattcatctcacagagctaaa

SEQ ID NO: 5737 - DNA, 147 bp, Protomyxzoa rheumatica
acctttcttttgatggagcagttttggaacactctttttgtagaatctgcaaatgaacatttgtagtgcgtggaggtcaatggtggaaaaggaaatatcttcacatcaaaaccagaaagaagcattctcagaaacttctttgtgatg

SEQ ID NO: 5738 - DNA, 384 bp, Protomyxzoa rheumatica
caatgctctactaaatatcactttgcaggtattgtaaaagtgctgcttccaaagagctgaatgaaaagaatggtttaactttgtgaaatgaatgctcacatcacaaagcagtttctcagatctgttccttctggtttttattcaggggtatttgctttttcactattagccccaaagagctctgaaacgtccattcgcagaatggaaaaaaccgtgtttccaaactactgaattcaaagaaagcttgaagtctgtgagatgaaagcacacatcacaaagcagtttgtcagaaagcttctttcacattttcatgtgaagttgtttcctatttcaccataggcatcaataatctccgatgtaagccattgcagattctacaaaggc

SEQ ID NO: 5739 - DNA, 291 bp, Protomyxzoa rheumatica
gcccattcctttcgcgtccattccattccattcgattccattcctttcatttgcattccttttgagtgcattccattcgagtccattccatgtgagtccattcaattgcagtccattcccttcctgtccttgccatttcattccactccattcaattacattgcattcgattccattccattcgattgcattccattcgaatccgttccatggagaccattccattcgtttcaactgcattgcaaacaattcgaattcgttccattcgaatccaatccattcgattccatt

SEQ ID NO: 5740 - DNA, 126 bp, Protomyxzoa rheumatica
actccactccactccacttcaatcaactccactccattccattccattcatttccactccactctaatccattcctctccaccccactccactaaagcccattcaattccatccaattccatacca

SEQ ID NO: 5741 - DNA, 147 bp, Protomyxzoa rheumatica
gtatttgttgtatattttggtattttatatagagaatgtaatatatatttggtgtactatttggtattttatttataatataaaataaatatttggtacactatttgatattttctgtacagtatataatatgtatttggtgtactt

SEQ ID NO: 5742 - DNA, 232 bp, Protomyxzoa rheumatica
cattccattccatcagattccattccactccattccactcaactccattccactccaccccattctattcaactccactccactccactccgttccattccactccatttcactcaactccaatccactccactccttcctattacaattctttcttttgacaggatctccctctgtcacacaggctgtagtgcagtggcacaatctcagcacacatttcttttcaccattc

SEQ ID NO: 5743 - DNA, 137 bp, Protomyxzoa rheumatica
tgaatggaatggactcaaatagaatggacggaaaaggaatggtctcgaatataatttattcaaatagaatggaatagaaagtaattcaatattatggaatggaatagaatggaatgaaaccgaatggaatgtaccgg

SEQ ID NO: 5744 - DNA, 136 bp, Protomyxzoa rheumatica
tatcttttcattgagcagtattgaatctctcttcatagaatctgcaactggatatttggtgcctttctggcctatgaataaaaaggaaatatcttcaaagaaaaggtacacagaagcattcagagaaacttcttca

SEQ ID NO: 5745 - DNA, 142 bp, Protomyxzoa rheumatica
caaaaggaacgtaccagaatggaatggactggattagaacggactcaaatataatcgattgaaaagtaacagattcgaatagaatggacttgaatcgaatgtaatcaaatggaatggaaaggaatggaatggaatggaatgg

SEQ ID NO: 5746 - DNA, 179 bp, Protomyxzoa rheumatica
aaagtacccaaactatatattatatactgtacataaaatatcaacctacccaaagcatgtattatatactgtccacaaaatatctaagtacccaaagtaggtattatatactatacataaaatattaaagtatcaaaattatgtattatatactgtatataaaatatcaaagtacccaa

SEQ ID NO: 5747 - DNA, 156 bp, Protomyxzoa rheumatica
gataagttcaactctgtgagttgaatgcacacatcacaaaatagtttttcagaatccttttgtgtagttcttatgtgaagatatttgattttccacagtagacctcaaagtgctccaaatatccactttcagaatctacaagaagagagattcaaa

SEQ ID NO: 5748 - DNA, 160 bp, Protomyxzoa rheumatica
gagggacaaacattcagaccctcgtagcagtgttctggaatcccatgtgattgacattcagaccacagcaggagtgttctggaatcccctgtgaggacccaacattcagacctctgtagcagtgttctggaatcctaagtgagagacaaacatttagacc

SEQ ID NO: 5749 - DNA, 126 bp, Protomyxzoa rheumatica
ttccactccattccattccactgcactcaactcccctccaatccactccactccactatacttcattacattccattctacacctttccactccactccactcccttccattcctttccatctcat

SEQ ID NO: 5750 - DNA, 182 bp, Protomyxzoa rheumatica
cagattttacaaaaagagtgtttgcaaaactgctctatcacaacaaagcttaaactctatgagttgaattcacacacaaccaacgaatttctgagaatgcgtctgtctagttttatgggaagatattcccgttacccaccaaggtttcaaagcactccaaatatcaacttgcagattctaca

SEQ ID NO: 5751 - DNA, 139 bp, Protomyxzoa rheumatica
attggaaaaacagtgtttccaaactgctgaatcaagagtaaggtttaactctgtcagatgaatgcatacttcacaaggtagtttctcagaaaccatctttctattttttatctaaagatattttccttttcaccatagg

SEQ ID NO: 5752 - DNA, 147 bp, Protomyxzoa rheumatica
ctcaaataggattccagaacactgctgctgggttctgtgtgttgatccctcacataggattccagaacaatcctgttgtggtctgggtgtttgtgcctcacatgggtttccagaacaatcctgctgtggtctgaatgttactcactc

SEQ ID NO: 5753 - DNA, 145 bp, Protomyxzoa rheumatica
gaatggaaaggattggtgtggaatggaatggagtgggatgcaatggagtagaatgtaatggagtggagtggtatagaatgcagtggaacacattggagtggaatcaaatggaatggagtggaatggaatggaatggagtggaatg

SEQ ID NO: 5754 - DNA, 177 bp, Protomyxzoa rheumatica
cgagaccaatatattccattcaaatccattctattccattccattcgagtccattcctttgcattccattctattagagtctattctattctattccattggagtccattccattccattccgttagagtcaaatccattaaattccattgtattccattcgagtccattctattcc

SEQ ID NO: 5755 - DNA, 131 bp, Protomyxzoa rheumatica
agaattcttctgtctagtttttatgtgaagatatttccttcttcaccgtaggccgcaaattgctccaaatatccatttgcggattctacagaaagaatgtttccaaactggtcaatcaacagaaaggctca

SEQ ID NO: 5756 - DNA, 142 bp, Protomyxzoa rheumatica
agcagcttctcaaaactcttctttccacttttaatctgaagatatttccttttttaccataggcttttctgtgctagctaatatcccttcacagattacacaaaaagtgtttccaaactgctcagtcaaaagaatggtgaat

SEQ ID NO: 5757 - DNA, 302 bp, Protomyxzoa rheumatica
ccattccattccattccattccattccattctatgccattccaatctattctattctattcgagtccattccattcaagtccattcgcttccattccattccattcctttccattccgtgccattccattcaattctattccattcgactccattccattccattcagttccatcccattccattccattctattcctttgcattaaattccatgcctttccattccattcgtttccattacttttgagaccattccactccagtccattccaatcgagtccattccattcccgtccattcc

SEQ ID NO: 5758 - DNA, 231 bp, Protomyxzoa rheumatica
ccattcattgattccattacattcctttcggattccattcgaatcatagaatggaaaccaatgcagtcatcatcgaatggactcgaatgcaaacattatcgaatgtcatcaaatggaaacatcatcgaatggaatctaatgggataatgatatggactcgaatggaaacatcaaatggagtcaaatggaatcatcatcaaatataatctaatggaatcatcgaatagcatc

SEQ ID NO: 5759 - DNA, 144 bp, Protomyxzoa rheumatica
ccaggtgatataccacttgtcaaggctctgcctacaggggtgttgtgacagaactctgcactgatcacccaggtgatgggacacatttctagactctgccaacagtggcattgtgaaatatctctgcactgatcacccaggtga

SEQ ID NO: 5760 - DNA, 283 bp, Protomyxzoa rheumatica
tttccttttccaccataggcctcaaagccctctaaatgcacatttgcaaattctacaaaaagagcgtttcaaaaaccgctctatcaaaagaaatgttaaactctgcgaggtgaatgcatgcatcacaaatcagcttctcacatagcttgcttctagtttttatcctgggatattcgtttttttgcaattggcctcaatgagctgccaaatttccattaattgacaaaaaaaagtgtttccacacatctgaatacaaagcaatgtttaactctgtgagatgaat

SEQ ID NO: 5761 - DNA, 147 bp, Protomyxzoa rheumatica
attcgatgatgattccattcgatgccattcaatgtttacatttgatatccttcgatgatgattctattcaattccattcaatgattccattcgagttcatttgatgttccatttgagtccattcgatatcaccaatcgattccattc

SEQ ID NO: 5762 - DNA, 185 bp, Protomyxzoa rheumatica
ctttccttctgcggctttctcccctctctctcttcacaaaattgatgagacttaggaccttgctctggattaggctttggcttaagagcacattgtggctggttttgatagtctattgagaccactcaattgcatatcagcaataaggctgtttcaccttcttatcattggtgtgttcactagag

SEQ ID NO: 5763 - DNA, 134 bp, Protomyxzoa rheumatica
tattccattcaatgatgattacattcgattcattctctgattacattcgatttcattcgatgatgaatccattcgagtccattccatgattccataagattccacttgatgatgattccattcaagtccattcg

SEQ ID NO: 5764 - DNA, 134 bp, Protomyxzoa rheumatica
aagaaaggttcaactccatgagatgaatgcagacatcataaagaagtttctcaggaatattctgtctagtatgtatttgtagacatttcccttttcaccatagggctcaaaccacacacaaatatccattcgca

SEQ ID NO: 5765 - DNA, 190 bp, Protomyxzoa rheumatica
actctttttgtagaaactgcaagtggttatttggagtgctttgaggcctgtagtggaataaaaaatatcttcacaaaaaaactacacggaagaattctgagaaacttcttcctgatgtgtgcattcatctaagagagttgaacctatctattcatagagcagttttgaaacccggaaaaactaatatttt

SEQ ID NO: 5766 - DNA, 151 bp, Protomyxzoa rheumatica
atagaatggaacatataagtatggactcgattggaatgttatgggatggactcgattggaatgcagtggaatggactcgaagataatggaatggaatgtactcgaatgaaattaaatgtacctgaaaggaatggaatggaagggaaacaaa

SEQ ID NO: 5767 - DNA, 199 bp, Protomyxzoa rheumatica
ggaatcgaatgcaatcatcatagaaaggaatgaaatggaattatcatcgaatggaatcgaatggaatcattatcgaatagaaccaaatggaatcatcgaatggaaatgaacggaatcataaatgaagggaatccaatggaatcatcatcacatggaaccgaatggaatcatcgaatggaatcgaatggaatcattgaat

SEQ ID NO: 5768 - DNA, 144 bp, Protomyxzoa rheumatica
ggaatggaagggaatgtagtggaacggagatgagtggaattgaatgaagtgtatttgaatggaattgaatggaacggacttgaattgaatggaaaggaatggactcgaatggaatggaaaggactggaatggaatggaatggaa

SEQ ID NO: 5769 - DNA, 157 bp, Protomyxzoa rheumatica
atgtcacaaagctcctgtaggcagaacttagatgagttacgtcacctctgtgattagtgctatggtatgtcacaaagccccctttaggcaaagcctagacaagagttacatcacttgggtgatcagtggcaagatctctcacaattcccctgtcggc

SEQ ID NO: 5770 - DNA, 253 bp, Protomyxzoa rheumatica
cttgtagcactgttctggaatcctacgtgagggggaaacatttagacccaagtggcagtgttctgggatgctatacggtggagaaacacttagaacacagtagcagtgttccagaatactatttgagggacaaacattcagaccacagcaggaaagttttggaatcctatgtgggggagaaacattcagaccacagcaggattgttctggaattccatgtgaggcaaaaacacccagaacgcaggaggggtgt

SEQ ID NO: 5771 - DNA, 143 bp, Protomyxzoa rheumatica
aacttctttgtgaagcatgcgttcatctcacagagttgaaactttattttgattgatcagtttggagacactcttttgtaaaatctcccattggacatttggagcactttgcggactacagtagaaaaggaaatatcttcaca

SEQ ID NO: 5772 - DNA, 146 bp, Protomyxzoa rheumatica
ataccattccattcgaatgaattacatttcaatccattacatttgagttggttctattccattccattccattccagtcgattccatttggatgcattccatactattgcattgctttcgattccattctattcgaataaattcca

SEQ ID NO: 5773 - DNA, 146 bp, Protomyxzoa rheumatica
ttagtttagagatgagacccccacagggaatgatctcctgagtgcacaaaagtgcccacttgttaacaaaaacaaaagataatgtatttgcccatgttgacaataatattgagtagaaattgaaaataaaagctaaaagtctccac

SEQ ID NO: 5774 - DNA, 127 bp, Protomyxzoa rheumatica
cagacctctccaggaatcccgcgggaaatggaagccactctctgggctcccacgcatgtccagcagggagaaacccacctggagggtggaggggagtgtggaactgaacctctgtgggagtcttgag

SEQ ID NO: 5775 - DNA, 163 bp, Protomyxzoa rheumatica
aggaatccagaacaatgctacgcaggtctcaatgtttgtccctaacaaagaattccagaacactgctatgagtgtctgaaagattggccctctcatacttttccagaactctgctgctggtgtctgaatgtttgtccctcacacaggattccagaacactgct

SEQ ID NO: 5776 - DNA, 251 bp, Protomyxzoa rheumatica
tatcttcccataaccactagacagaaacattctcagaaatatctttatgacgaatgtactcaactagcagagaagaactttccttttgacagcgcatttttgatacactcttttttagtatctgcaagtggatatttggatagctgtgaagatttcgttggaaacgggaataccttcctataaagtctagacagaagcattgtcagaaactgctctgtgatgtctgcattcaagtcacagagttgaacatt

SEQ ID NO: 5777 - DNA, 146 bp, Protomyxzoa rheumatica
catctgaatgtttgtccctcacataggattccagaacacccctgctgtggtacaaatgtttgctcctcacataggattccagaacactgctacgtgggtctaattatttgtcccccacataggattccagaacactgctacaaggg

SEQ ID NO: 5778 - DNA, 122 bp, Protomyxzoa rheumatica
gtgtagtttttatttgaagatatttccttttcctctgtaggtggcaaagggctccaattatccacttgcagattctacaaaaggagagattcaaaactgctcaatcaaaagattggttcaac

SEQ ID NO: 5779 - DNA, 234 bp, Protomyxzoa rheumatica
tggaatggaatgcaatggaatggactcgaatgtatttgagtggaatttactggattggaatctaatgttatggactctaacggaatggaatggaatggactttaatggaatggaatagaatggacatgaaaagtatggaattgaatttgatggaatggaatgtattggaatggaagggattggaatagactggaatggaacggactggacttgaatggaatagaatggaatgga

SEQ ID NO: 5780 - DNA, 161 bp, Protomyxzoa rheumatica
tttgagttgaaggcacacatcacaaagtactttctgggattgtttctgtctagtttttatatgaagatacttccttttctaccacaggataaaaagcgctctaaatatccacttggaaatactacaaaaagagtgtttcaaatctgttctatcaaaagtta

SEQ ID NO: 5781 - DNA, 249 bp, Protomyxzoa rheumatica
gtttccacacgattccattcaatgatgattatattcaagtccattcgatgattctatttgattccattagatgataactccatcccattccattcattggtgattccattcaattccattcattgattccattccatttcattcgacaatgattccattcgatgatgattctattcttccccattagatgattccacatgattgtagttgatgatgattctattcttccccattagatgattccacatg

SEQ ID NO: 5782 - DNA, 158 bp, Protomyxzoa rheumatica
cattgaatggaatcgaatggaatcacggaatggactcgaatggaatcatcgaatggttgcaaatgcaatcattgaatgtaatagaatagaatcatcgatggaatagaatggaatcatcattgaatggactcgaatggaatcatcgaatggactcgaat

SEQ ID NO: 5783 - DNA, 161 bp, Protomyxzoa rheumatica
tgatgattcttttcaatgccattcgatgtttccattcgtgtccatgtgatgattcctttcgattccatttgttgatgattcctttcaatgccactcgatgattccattcgatttcaatcaatgatgattcaataggtttccattcaattattccattcgat

SEQ ID NO: 5784 - DNA, 132 bp, Protomyxzoa rheumatica
ccatgactcggtctcctgagtcaataaacctctacccagtaagagatcaggcaatcagacagtactaaaaaggcaggcgagaaacctagaggctctggaggacaacttagaggatacaaaaaggagtgtttt

SEQ ID NO: 5785 - DNA, 141 bp, Protomyxzoa rheumatica
tttgtagaatctgcaagtggataactggagtcctttctgccctttggtggagaaaggaatatcttcaaataaaaactgtatagaagcattctcagtaacttcttcgtaatgtgagcattgaactcacagagttcaaccttt

SEQ ID NO: 5786 - DNA, 129 bp, Protomyxzoa rheumatica
tcaactcacagagttgaaccttccttttgatagagcagttatgaaacactctgcttttagtacctgcaagtggacattatagcgctttgattccttcattggaaacgggaatatcttctcataaaaact

SEQ ID NO: 5787 - DNA, 192 bp, Protomyxzoa rheumatica
aatggaatggaatcgaaaggaatggaatggaatggaatggaatggtgacatgaaatgttagctaagattgtgcactgaactccagcctgggtgacagagtgagatcccatcaaaagaaaggagtggaatggaatggatttacaatggaatggaatggaattgagtggagtggagtggagtggcgtggagtgg

SEQ ID NO: 5788 - DNA, 155 bp, Protomyxzoa rheumatica
gaatggaatgaaatggaatgcaatggaatggaatggtgaaatgaaatgtaagctgagtttctgccactggactccagcctgggtgacagagtgagatcctgtcaaaacaaaagaatggaattgaatggagtggagtggaatgtaatgtaatggag

SEQ ID NO: 5789 - DNA, 157 bp, Protomyxzoa rheumatica
tgtgtttagctatgatgtgatactaggtttcccgactcctgggcaggcagttttcctggtacagcactctttatctggtttgtttgtttgtttgtttgtttgtttgtttgagacagagtctcgtaatgtcacccaggctggaatgcaatgatgcagt

SEQ ID NO: 5790 - DNA, 179 bp, Protomyxzoa rheumatica
aactctgtctcaaaaaaaaataataataataaaaaacttaaaaaaattagccatgcatagtggcatgtgcctgtagtcccagctccttagaaggctaaggagggaggatcacttgaacccagaaattccagttgagcctgggcaacaaagggagacagacccccatctctgcaataaat

SEQ ID NO: 5791 - DNA, 159 bp, Protomyxzoa rheumatica
cccttcacagattctagaaaaagaatgcttccaacctactgattgaaaagataggtttaccttctaagatgaatctacctgtcacaaagcagtttcagaaataactatcctctagtttttattctgggataatctcttttacctcttaggcctcattgg

SEQ ID NO: 5792 - DNA, 129 bp, Protomyxzoa rheumatica
gcaaaaagacattagaaagcccatcgagacttataggaaaaaccccaatatgcccagataaaactgaaaggaaactatacgtaaaactgatttttgatatgtggattcagctgacatagttaaaccatt

SEQ ID NO: 5793 - DNA, 166 bp, Protomyxzoa rheumatica
acttaaagtataataataataaaagtaaataattaaaaaataaacccagagctccaaaaaaaataagaatggttcaactctatgagatgaatgcataaatcacaaatatgttcctcagaaagcttctgtctacattttatatgaagatatttcctttttcaccata

SEQ ID NO: 5794 - DNA, 208 bp, Protomyxzoa rheumatica
tccacaagcagattctacaaaagcagtgttttaaaactgatctatcaatagaaaggttctactctgttaattgaactcacacatccaaaggggtttctgagaatccttctgtctagcttttatttcaagatatttctttttccaccataggcaacaaagtgctccaaaggaactcttgcggattctacaaacagcgtgtttccacact

SEQ ID NO: 5795 - DNA, 142 bp, Protomyxzoa rheumatica
tgaattgaattcaatcgaatggaatggactggaatgaaattaagtggaatagaacggactcgaatataatggattgtaatgtaattgattccaatgacttgaaatcgaatggaatgtaatcaaatggaatggaatggaatgc

SEQ ID NO: 5796 - DNA, 122 bp, Protomyxzoa rheumatica
cattgcattccattcgatatctttccattacactccattcaattctattcttttcgtttctgttcaattccattatattcgattccattccattcagttccattccattcgactccattcca

SEQ ID NO: 5797 - DNA, 150 bp, Protomyxzoa rheumatica
agtgattctcctgcctcagcttccagagtagctggggctataggcaccggccaccacacccagcaaatttccgtattattagtagagatggggtttcaccatgttggtcagactggtctcaaactcctgacctcaaatgatcagatcgga

SEQ ID NO: 5798 - DNA, 141 bp, Protomyxzoa rheumatica
agaacattcctcttgtggtctgaacgtttgttcctcacattagattctagaacactgctatgagcatatgaatgtttgtccctcacacagaattccaaaacactgttacgagggtctgaatgattgtccctcacataggat

SEQ ID NO: 5799 - DNA, 175 bp, Protomyxzoa rheumatica
gagttctcccagcttcacttctttgatcaccatcactgggtccacatcccacagtactgccagcttcacttcctcaatcaccaccactgagaccacctcacacagtactcgcagcatcacttcttcaatcaccaccaccaagaggacatcccacagctctctcagctacacttct

SEQ ID NO: 5800 - DNA, 210 bp, Protomyxzoa rheumatica
agagataaggtcttgctttgtggcccaggtgaaaccttgttttttaacatgagttaatatcagtgtaaagagttatggttttacctattttttttttcctcagacagggtctcattgtcacccaggttggagtgcaatggtgaaatcatagctcactgcagcctccaactcctgagctcaggcagtcctcccacctcagcctcctatttt

SEQ ID NO: 5801 - DNA, 124 bp, Protomyxzoa rheumatica
actcacagagttgaaccttccttttgagagaggttttgaaacaatctttctgtggtatctacaagtggatatttgtaatgatttgaggcctaagagggataaaggaaataccttcacatacaaa

SEQ ID NO: 5802 - DNA, 251 bp, Protomyxzoa rheumatica
tcaaatggaatcatcaacgaatggaatcgaattgaatcatcaagtggaatcatcaacgaatgaaattgaaaagaatcaacgaatgaagacaattgctatcataatcgaatttaatcaaaaggaatcatcatcaaatgaaattgaatggaatcctcgaaaggaatcgaatggaatagtcattgaatggaataaaatggaatcctcgaatggaatctaatggaaccaaccaatggaatcgaatggaatcattg

SEQ ID NO: 5803 - DNA, 150 bp, Protomyxzoa rheumatica
cagtgttgaaacacactttttgtagaatctgcatgtgttcatttggagcgctttgttgccagtggtggaaaaagaaatatcttcatataaaaactagatagaagcatttgcagaaacccctttgtgatgtgtgtgttcaattcacagagt

SEQ ID NO: 5804 - DNA, 129 bp, Protomyxzoa rheumatica
attcaactcacagagttgaacgttcctcttgacagagcagttttgaaatatcctttttgtagaatctgcatttggatatttggacctctttgttatgttcgtttgaaacgtgatttcttcatagaaaac

SEQ ID NO: 5805 - DNA, 144 bp, Protomyxzoa rheumatica
aaatgtccacttgcagaatctactaaaagattgtttccaaaatgctgaatcaaaagaaagtttcaactcggtgagatgtacctacacataacagtgaagtttctcagaattcttctgtctagtttttatgtgaaaatatttcct

SEQ ID NO: 5806 - DNA, 202 bp, Protomyxzoa rheumatica
aactgctttgtgatgtgtgcattcacctagcagatttaaagctttcttttcatacagcagtttggagacggtgttttgtagaatctgtgaagggatactttggagagcattgaggcctacggtaaaaaaggaaatatcttcagataaaaagtacaaacaaactttctgagaaactgccttgtgatgtttgagttcatctcac

SEQ ID NO: 5807 - DNA, 138 bp, Protomyxzoa rheumatica
tgcactgatcagtcaggtgatgcaattcttctctaggctctgcctacagtgtgcattgtgacatatctctgcactgatctccccgatgatgtaaactttgcctaggctctggccacacggcattgtgacatatcactg

SEQ ID NO: 5808 - DNA, 128 bp, Protomyxzoa rheumatica
aaaacgaaatatcttcacataaaaactagaccgaagaattgtgagaaacttccttgtgacttgtgctttaatctcacagattttaacatttcttttgattgagtagttaggcaacgctcttattgtag

SEQ ID NO: 5809 - DNA, 222 bp, Protomyxzoa rheumatica
ttttaatgtgaagatatttccttttccaacataggcctctaagtggccaaatgtccacgtggaaattctacaaagagtgtttcacaactgctcaatcgaaagaaagattaaactctgtgagataaattatcacatcagtaagaattttctaagaatgatcctgtctaggttttatgtgacgtttttaccttttcgacaataggcctcaaagcgctccaagtg

SEQ ID NO: 5810 - DNA, 138 bp, Protomyxzoa rheumatica
agattccacaaaaagagtgtttcaaaactgctctatcaatggaaaggttcaaatctgttagttgagtacatacataacaaaaaagtttcggagaatgcttctgtattatttttatgggaagatatttcctttttcacc

SEQ ID NO: 5811 - DNA, 146 bp, Protomyxzoa rheumatica
tgacatatctctgcactgatcatttagatgatgtaacacttttaaaaggactgcctacggggaattttgacaaatctctccacagatcacataggtgatgtaactcttgtctaccctctgcccatagggggcattgtgaaatatct

SEQ ID NO: 5812 - DNA, 132 bp, Protomyxzoa rheumatica
caatccattcaattccattccactccattccattccaatccaatccattctactcttctccagtttacttcacttcattccattctattccttttgataccattcgattccgttcgattccagtcaatgccc

SEQ ID NO: 5813 - DNA, 188 bp, Protomyxzoa rheumatica
aaccagtgaacccctagcacaacagacatgaggatgacacactgaagcacgtcataatcaaattgccccaaaccagtgacaacaagaaaatatgaaaagttaccaaagggaaaaggacattatacagagagggacaaagatgaaaatagactgagcgtggtggctcacacctgtaatcccagcacttt

SEQ ID NO: 5814 - DNA, 151 bp, Protomyxzoa rheumatica
gatgtgtgctttcaactcacatagttgaacctatctattgattgaaactctttgtagattcggcaagtggatatttggagccctttgcaacctatggtggaaaaggaaatatcttcaaataaataatgcacagaagcattcaaagaaactt

SEQ ID NO: 5815 - DNA, 187 bp, Protomyxzoa rheumatica
cacatcacaaagaagtttctttgaatgcttctttgtagtttttatgggaagataaatccttttccaccgtaggcctaaaagatctccaaatatccacttgcagattctacaaagccaatgtttcaaatctgatcaatcataagataggttaaactctgtgagatgaaagcgcacatcacaaaaaagt

SEQ ID NO: 5816 - DNA, 127 bp, Protomyxzoa rheumatica
gatatttgcattcaactcacagtgttgaacatacccattcagagaggggttctgaaacactattttcgtagtatctgcagcggatatttggacggtttgaggccttcattggaaacgggaatatctt

SEQ ID NO: 5817 - DNA, 135 bp, Protomyxzoa rheumatica
acttcagcagtgtctcaggatacacagtgtgcaaaaatcacagttattcctatacaccaataagagagccaaatcatgagtgaactgccattcacaattgctacaaagataagaaaatacctagcaatacaacat

SEQ ID NO: 5818 - DNA, 191 bp, Protomyxzoa rheumatica
ggacgtcaatggaatggagtcgaatggaatggaaccaaatggtatggaattgaatggaatcgaaaggaaaagaatagaatggagtgtaatggaaagatatcgaatggaatggaaagaaggggaatagactcgaatggaatgggctgcaatgaaatagattcgaatggaatggaatggaatgaagtggactc

SEQ ID NO: 5819 - DNA, 135 bp, Protomyxzoa rheumatica
agttaaatctttcttctgattcagcaagttggaaacagtcttttttgagagtctgctaagggataaatatcccaaatgggagcccacagaggcctatggggtaaaaacgattattgtcttataaaaagtacaaag

SEQ ID NO: 5820 - DNA, 150 bp, Protomyxzoa rheumatica
gaatcctatgtgagggagaaacacttagaaaccagctgcagtgttctggaatcttatgggatggacacacatgtagaccccagcagcattgttctggaatcctgtgagacggacaaacattcagaccccagcagcagtgttctggaatcc

SEQ ID NO: 5821 - DNA, 154 bp, Protomyxzoa rheumatica
tcacccaggttatgtaactcttgtctaggctcaacttacagggagtattgtgtgatatctctgtactgatcacccaagtgatgtaactcttttccaggctctgcctacagggacattatcacatatcacagcactgatcaccgaggtgatgtaa

SEQ ID NO: 5822 - DNA, 150 bp, Protomyxzoa rheumatica
tggatatttggaccgatttgaggcctttgttgaaaggagaatatcctcacataaaaagcaaacagaagcattctcagaaacttcattgcgatgtgtgcattcaacgcaccgagttgaacttttcttttgatagagtagttttgaaacact

SEQ ID NO: 5823 - DNA, 173 bp, Protomyxzoa rheumatica
gtggacaatttgagcaccttgtggcctctggtggaaaatgaaatatctttacataaaaactagactgaataattctgggaaacttctttctgatgtgtgcgttcatctcacagagttaaacttttcattttattgaacagtttggaaacactctttttgtagaatctgcaagt

SEQ ID NO: 5824 - DNA, 131 bp, Protomyxzoa rheumatica
atatactacaaaaagagtgtttcaaagctgttcaatcaaaacaaaggttcacctcggtgagatgaatgcacatatcacaaagaagtttgtcagaacgctcctgtctagtttttatgtgaatatatttcctt

SEQ ID NO: 5825 - DNA, 170 bp, Protomyxzoa rheumatica
gaatgtaatctgatggaatagagttgaatcaaatggacacgaattgaaagaactggaatgcaatagtctaaaatagaatgaaatggaatggtatggaatggactacaaaggaatggaaaggaatggaatggaatagaaaggaatggaatggaaacgaatggaatgggatt

SEQ ID NO: 5826 - DNA, 149 bp, Protomyxzoa rheumatica
cctttcttttgtttgagcagtttggaaacagtctttttttagaatatgcaaacggatattgttgagccctttacagcctatgatgaaataggaaatacctttacataaaaactaaaaagaatcattctgagaaacttctgtgtgatgtg

SEQ ID NO: 5827 - DNA, 286 bp, Protomyxzoa rheumatica
acccttgtgatatgtaaagcaaaggaatggaaaggaatcaacaaaagtggaatggaatgcaatggaatacaatggaatggaatggaatggaatggattaaaccggagtggaatggaatggaatggaatgcaatggattcgattggaacttaattaacccgattggaatggagtggaatggaatggaatggaaagaagccgattggaatgcagtggactgaaaaggaatggaattgaaagggatggaatggaatggaatggaatgcaacggaatggaatggaatgga

SEQ ID NO: 5828 - DNA, 226 bp, Protomyxzoa rheumatica
tgagggaaaaacattaagaccctcttagaagtgtcctggaatcctatgtgagggaaaaacactcaaaacccagcagcagtgttgtggaatcccatatgagggacaaacattcagaccggggcaggagtgttctggaatcctatgtgaggtataatcattcagaccgtcaaggcagtgttctggaatcctatgtgaaggagaaacagtcagaacccagcagcagtgt

SEQ ID NO: 5829 - DNA, 161 bp, Protomyxzoa rheumatica
atattttacggacaaatattagaaccctcatcacagtattgtaggattatatgtgaaggagaaacattcagaaaacagcagcagtgttctggaaccctatatgaggaacaaacattcagatcacagcaggattgttctggaatcctatgtgagggacaaac

SEQ ID NO: 5830 - DNA, 305 bp, Protomyxzoa rheumatica
taactattgtctaggctttgcctacagggggtttgtgacatagctttgcactgatcaccgaggtgatgtaaactcatctaaattctgcctacaggagctttgtgacgtatctctgcactgatctcttaggtgatgcaacacttatataagcactgcccacagggaattttgacaaatctctgcactgatcacctaggtgatgtaactcttgtctaccctccgtccaacggggcattgtgaaatatctcagcactgaacacccaggtgaatcaactcttgactaggaactgcctacagaggttatt

SEQ ID NO: 5831 - DNA, 219 bp, Protomyxzoa rheumatica
cacaaagtattttctgagaatgcttctgtccagtttttacacgaagctatatcctttactagcttaggcctcaaagcgttccaaatctccacttgcagatactacgaaaagagtgtttcaacttgaactcacaagggaatgttcaaccccgtgagttgaatgccaacatcacgaagaagtttctgagaatgcttctgtttagttatgtgaggtttatcc

SEQ ID NO: 5832 - DNA, 279 bp, Protomyxzoa rheumatica
cactccattacatttcatctcattccattccactccattccactccactacaccccactccggtccactgaattccatttgattccataagaatccatacaactccattccactccagtccactccacgctattccactctactccactcaattctattaccttccatttaaaatccattccattccattcctttcttttgacaggatctcactaggtcacccaggctggattgcagtgcataatctcagctcacatttgatttctccattccattcca

SEQ ID NO: 5833 - DNA, 128 bp, Protomyxzoa rheumatica
gtcagttattccccataggcctcaaatgtttcacaagtgtccctttgcagattctccaaaaacagtgtttccaatgctgactaaaagaaaggtttaattctgtgagataaatccccatatcacaaagc

SEQ ID NO: 5834 - DNA, 220 bp, Protomyxzoa rheumatica
tcaattacattgcaatccattacattcaagtcagtcctattccagtccattccattcctgtcccttccattcgattctattccatttgattccattacatactattgcattccatttgattaaattgcatacgaataaattccattcaagaccaatccttttgcatccattctatttgggtccattccatacgagtccattacatttgggtctattccat

SEQ ID NO: 5835 - DNA, 153 bp, Protomyxzoa rheumatica
cacaaagaagtttctcagaatgcttctgtgtagtttttttgtgaagacatttccttttacactgtaggccgcaaagggctacatatatccacttgcagattctacaaaaagagtttcaaaattgttctctcaaaagacaggttccaccctttg

SEQ ID NO: 5836 - DNA, 140 bp, Protomyxzoa rheumatica
aacggaatggaaaggattagaatggaatggaatctaatgaattggaaaggattagtatgtaatggactggaatgtaatgtacccgaatgtaaggaactctaatggaatggaatcgaatggaatggaatcgaaaggaatgg

SEQ ID NO: 5837 - DNA, 135 bp, Protomyxzoa rheumatica
ccattcaattccattccattggattccattccgttggctagcatgccattcgattcttctccattccattccgttccgttcgattcccttccatttgagaactttccatttgagtccattccattccagtccatt

SEQ ID NO: 5838 - DNA, 169 bp, Protomyxzoa rheumatica
aaaaactacacagaggcattctgagaaacttctttgtgattgtgcattcaactcaaaaagttaaacctatcttatgattgaccagtttgggaacactcttttcataggatctgcaagtggatatttggcgtgctttgaggcctatcgtggaaaagcaaataacttcaga

SEQ ID NO: 5839 - DNA, 124 bp, Protomyxzoa rheumatica
taggcctcaaagcgctccaaatatccacttgcagattctgaaaaaagagagattcaaaactcctcaatcaaaagatagcttctactctgtgagttgaatgcaaacctcacaaagatgtttctca

SEQ ID NO: 5840 - DNA, 260 bp, Protomyxzoa rheumatica
ccattccactccattccatgccattccagtccattccttttgagtccattctgttcaaatctattccattccgttccattccgttccattccatgccattagattctattccattccattgtgttacattccattccattccattccatttgaatccattccattatattccattccgttcccttcccttccattcgattccattccatttgatttgattcgattcttttccattccaatccattccattccattaaatt

SEQ ID NO: 5841 - DNA, 156 bp, Protomyxzoa rheumatica
taactcttgtctaggctctgcctacagtggcacagtgacatatctctgcactgatcatccaagtgatgtaacacatgtcttggatctgcctaaagggaatttgtgacatacctctgcactgatcatccaggtgatggggctttcgtctaggctctc

SEQ ID NO: 5842 - DNA, 152 bp, Protomyxzoa rheumatica
cactccaattccactcaattaccctccattccagtccgttccattccataccattccatatcattccattatactaatctccaatccactccactctgttcaattccattctttacccttcctttcctttctactccattccactcctctcc

SEQ ID NO: 5843 - DNA, 166 bp, Protomyxzoa rheumatica
gaatggactgggagtatattcattctctgccactcttttgtcttccaccatgtaaggatgcaggaagaagtctctcatcaggtaccagatgacagtgccttgatcctggacttcccagcttccagaactgttaagaataaatttctgtcctttattaattaccaag

SEQ ID NO: 5844 - DNA, 123 bp, Protomyxzoa rheumatica
tccataccctttgggttgattcctttccattccattccgttctataccattccactccattcctctccattccattctggtggattcctttcaattccatgcccttttattccattccattgc

SEQ ID NO: 5845 - DNA, 233 bp, Protomyxzoa rheumatica
tctgaatttgctttgctttctttattctttcatgttttttattcttttgttttttgagtgtatattttttccagctttcttatgttaaataattaattttgatgattcattgcatgaataagaaataatagtttatttatacaatcagactgtcttcccgaaatgtaattattaattcaaaataataattactgtacaatgaggaaacccagtgggtcatcatattatccagg

SEQ ID NO: 5846 - DNA, 166 bp, Protomyxzoa rheumatica
ggattcccatgtgcggcaacatggggagtcttcagtgtgggcggtttggaaactggcaagtagagcgatggcaccatgcgggtcttccacccttccctgcatgtttctgggtgctcgaagagctccgggagaaaaaagtccacatgacacatctctgaactgatca

SEQ ID NO: 5847 - DNA, 136 bp, Protomyxzoa rheumatica
ataaccatcgaatggaatcgaatagaatcatcaccgaatggaatcgaatggaatcatggaatgaactcgaatggaatcatcctcgaatggactcgaatggaataaacaccgaatggaatcgaatgaattcattgaa

SEQ ID NO: 5848 - DNA, 183 bp, Protomyxzoa rheumatica
tctctcttagttgagtgagtgggaatatcacaagtttctgagagtgcttttgtctagtttttaaggaatgatatttccattttcaccataggccacaaatcgctccaaatgtccatttccagatacgacaaaaggagtttttgaaacctgctctatgaaagggaatgttcaactctgtgactt

SEQ ID NO: 5849 - DNA, 158 bp, Protomyxzoa rheumatica
cagttcatttccttccactccattccattccattccattccaatactatcccttccattccttacatttgacaggatatcactctgtcactcagtctggagtgcagtggtaaaatctcagcttacatttcgtttcactattcctttccattccattcc

SEQ ID NO: 5850 - DNA, 237 bp, Protomyxzoa rheumatica
tccatcccacaccactacattccattccattctattctttcgacaggatctcactctgtcacccagaatgcagtgcagtggcacaatctcaggtcacatttcatttcaccattctattccattctgttccattccattctaatccattcccctctactcaagtccactccactccactccattccattccatcccattctattcaactccattccactccacaccactccactccac

SEQ ID NO: 5851 - DNA, 256 bp, Protomyxzoa rheumatica
tccgagccatgtgtgggatataatatcctggtgtgccattttttaagcctgttgaaaaagtgcagtattagtgtgggagtgacctgattttccaggtgccatctgtcgcccctttatttgattaggaaagggaactccctgaccacttccacttcccatgtgaggaaacgcctcgctctgcttcagcccatgcatggcaccctgcacccagtatcctgtgcccacagtctggcaatccctagtgagatgaacctgg

SEQ ID NO: 5852 - DNA, 316 bp, Protomyxzoa rheumatica
ataaatgtaaactggaaaaagaaaacactactctgacttccagactggccctggctcaatttcaggcctatgtcttgactgatcaggctcaaagctaacagattattgatgaaaaaaacagctgtgcaagtggtgtggtcagggtaaaactgaagaacgagtcagctggggcttggagtgggtaaaaacccagttcctatctgaagaatgggaaattagcctttacaaatttcaagaacctgcacaaactataaaattgctttgcatcccatggaacgcaaggaaaaagtccattttaccaaaggctatggttaaa

SEQ ID NO: 5853 - DNA, 201 bp, Protomyxzoa rheumatica
aggaaatatcttcaaataaaaactacaaggaagcattcagagaaactcctttgtgatgagtgcgttaatcagacagagttgaaactttctttgcattgagcagtttgaagcactctttttgtagaatctggaagggggtatttgagggctttgaggcttatttgaagaaggagatatcttcacataaaaactacacagaag

SEQ ID NO: 5854 - DNA, 123 bp, Protomyxzoa rheumatica
agtaaatttgttaatggtttagctatcatctaatatgattgaaaatatgtcaatttgtcattgccgatgaacctttgtgttatttattgtactgttacatattctgtccataaatgtctaagg

SEQ ID NO: 5855 - DNA, 142 bp, Protomyxzoa rheumatica
aggttctacaaaaggactctttccaaactgctcactccaaagaaattttcaactctgttatatgaattcacacatcacaaaatttctcagaatgcttctgcctagattttatgtgtagatatttcctttctcaccataggtg

SEQ ID NO: 5856 - DNA, 137 bp, Protomyxzoa rheumatica
ttttgtggaaaaggatatatcttcacataaaaatgacacagaagtattctgagaaacaactttgtgatgtgtgtattcatcactcagagttgaaacatttttttgattgagtggttttgaagcagtctttttgtaga

SEQ ID NO: 5857 - DNA, 138 bp, Protomyxzoa rheumatica
gcctgtggtcccagttatttgggactcaggaggctgaggtgggaggatcccttgaggctgtgggggtggaggttgcagagtgagccaagattgggccgggccactgcactccagcctgggtgacaggcgagaacctgt

SEQ ID NO: 5858 - DNA, 134 bp, Protomyxzoa rheumatica
tccaaatgtctacttccagatactgcaaaagagtatttcaaaactgctgtatcaaaggaaatgttcaactctgcgagttgagtacacacatcacaaagaaggttctgcgaatgcttctgtctagtttttatgtg

SEQ ID NO: 5859 - DNA, 396 bp, Protomyxzoa rheumatica
acactctttttgtagaatctgcaagtggatatttggagctatttgaggcctattttgaaaaaggaaatatcttcacataaatactgcacagaagcattctgcgaaacttcttgttatgtgtgcattcaactcacagtgttcaccctatcttttgattcagcacttttaaatctctcattttgtagaatctgcaagtggatacttggagtactttgtgccctatggtggaaaatgaaatatcttcaaataaaaactacacagaagcattctgggaaacttctttgtgatgtgtccattcatttcacagagttgatcctttctttttattcagcagttttgaaacactccttttatagaatctgcaagtacatatttggagcgctttgaggcctattg

SEQ ID NO: 5860 - DNA, 143 bp, Protomyxzoa rheumatica
cagattctacaaaaagagtgtttcaaaactgctctagaaaaagaaagtgtaaacccagtgagttgaatgcacccatcacaaggtagtttctgagaatgattccgtctagtttttatatgaagatatttccttttctaccattg

SEQ ID NO: 5861 - DNA, 177 bp, Protomyxzoa rheumatica
ttccactccactccatttcactccattacaatccatttcattccacaccactcctctcaactccattcctttccattcaattcctctccactcctttccattccattccattccatttcattccactgcactcagatccactgccctcaactccattccactccactccattccatt

SEQ ID NO: 5862 - DNA, 171 bp, Protomyxzoa rheumatica
tcaggaacaacattgagatgtgcatattcaactaacagagttctaactgtctttttatagagcagtattaaaacactccttttgtagaatctgcttgtgaatatatggaactctttgaggaattagttggtaaagggtatcttcacaaaaaaagtagacacaagcattgtc

SEQ ID NO: 5863 - DNA, 144 bp, Protomyxzoa rheumatica
ctgtggtctgaatgtttttccctcacataggattacagaacactgctagtgtggtctaaatgtttgaccctcacataggagtccagaacactgctgctgggttgcaagtgtctctctctcacatagaattcaggaacactgcta

SEQ ID NO: 5864 - DNA, 140 bp, Protomyxzoa rheumatica
gtgctttgaggtctttggaggaaaaggaaatatctgcacataaaaaccagaaagaagctttctgacaaactcctttgtgatgtgtgaattcatctcacagaattcaaccttacttttgattgagcagttttgaaacaccc

SEQ ID NO: 5865 - DNA, 133 bp, Protomyxzoa rheumatica
ctccactccattccattccattgcactccattagattgcattcctttcgtttgacaggatctcactctgtcacccaggcaggagtgcagtggcacaatctcaccccatttttcatttcaccattccattcctt

SEQ ID NO: 5866 - DNA, 151 bp, Protomyxzoa rheumatica
gattccattcaatgatgattccatttgattccattcgaagattccatgcgattccaatcgatgatgattgcattcgtgtccctgcgattattccatttgattccattcaatgatgatttcattcgagtccatccaacgattccattcaagt

SEQ ID NO: 5867 - DNA, 313 bp, Protomyxzoa rheumatica
gaatgttcaactctgtgagttgaatgcaatcatcacaaagtagtttctcagaattctctttctactttttatgtggatatatttcctttttcgccataggcctcaaagtgccccgaatgtccacttccagatgctacaaaaacagtgtttcaaaactgctctttgaaagggaatgttcaacttcctgagttgaatgcaaacatcacacattagtttctgagaatgcttccctctatttttcatgagaagatattcccgtttcaaatgaaagcctcaaagctatccaaatacccacttgcagattctacaaaag

SEQ ID NO: 5868 - DNA, 255 bp, Protomyxzoa rheumatica
atgatgattccattcgagtccatttgatgattccattggactccatttgatgatgattccattctaatattccattcgattctattcgatgatgattccattcgatttcattcgatgctgattccattcaattccattcgatgattccattctattccattcaatgacgattccattcgagtacattagatgatttcattcaattccattcgacgatgattcaattcgtgcccattagatgatttcacacgattc

SEQ ID NO: 5869 - DNA, 225 bp, Protomyxzoa rheumatica
tgtacagctttgaagccttctttgatagagcagttttgaaaccctctttttgtagaatctgcaaggggacatttggagtgctttgagggctatggtgaaaaaggaaatatgttgacataacaactacacagaagcattctgagaaacttcctgtgttgttcactttcaactaacagagttgaacattcgttttcataaagcagttttgaaacactctttttgtcg

SEQ ID NO: 5870 - DNA, 133 bp, Protomyxzoa rheumatica
tgaatgacagcattaaattctcacaggagcatgaaccctattgtgaaatatgcatgtgagggatctaggttacctgctccttatgagaatctaatgtctgatgaacaatttcatcccaaaaccatcccccctc

SEQ ID NO: 5871 - DNA, 162 bp, Protomyxzoa rheumatica
tttatatgaagttattcccgtttccaacgaaatcctgaaacctatgcaaatatcccctcgcagattctacaaaaagagttttccaaaacagctctgtaaaaagaaagattcaccgctgttagttgaatacacacatcacaaactagtttctcagaatgcttc

SEQ ID NO: 5872 - DNA, 134 bp, Protomyxzoa rheumatica
ttagttgaactcacacaacacaatgaactttctgaaaattcttatgtcaagttttttatgaagaaatcccgtttcaaaagaaggcctcaaaatatacaaatattaatttgcagattctacaaaaagagtgtttc

SEQ ID NO: 5873 - DNA, 228 bp, Protomyxzoa rheumatica
cattccactccactcccttccattccactccactcaactccattccaactaactccactgcattccaatccattcaactccagtcctctccacttcacaccattccactccacgccactccactccactccataccattaaactcctttctttcaacaggatctccctctatcacacaggcggtagcacagtgacacaatctcagcacccattcctttcctttccatt

SEQ ID NO: 5874 - DNA, 197 bp, Protomyxzoa rheumatica
acaaaatactttctctgaatgtttctgtgtagtgtttatgtgaagatatttccttttccacaataggaatcaaagcactgcaaatatccacttgcatattctacaaaaagtgtgtttaaaaactgctcaatcaacagaaagtttcaattctatgtgatgaatgcacacatcgcaaggaagtttctcagaatgcttct

SEQ ID NO: 5875 - DNA, 175 bp, Protomyxzoa rheumatica
aatggggaaaaaaatccgcagataaaaactagaaagaagctatctgtgaaaagatttgtgatgtgtggatttctctcatacaagtaaaactgccttttaatacatcaggttggaaacactgtttttggatattctgtgaagagacatgtaagagcccattgaggcctatggggaa

SEQ ID NO: 5876 - DNA, 206 bp, Protomyxzoa rheumatica
attggagatctgtattttccttgatgtaattttcccagcaagataaacatatgagtcataatatgtaaccagctggagtcccagaaaacctagcatgccttaatgttggagaatgcaattttgttttgtttcttgttttttgttgttttttagatggagtcttgctctgtcaccaggctctcatgcagtggcacaatctcggctca

SEQ ID NO: 5877 - DNA, 133 bp, Protomyxzoa rheumatica
taaaccattcttttcattctgctgtttctaagcagtatttttacagaatctgcaaagggatattttggagatcatttaggcctatggtgaaaaaggaacatcttcagtttaaaactagaaagaagctttctga

SEQ ID NO: 5878 - DNA, 142 bp, Protomyxzoa rheumatica
cacatcaccaagcagtttctcagagagcttctttctcatttttatctgaagatgtttcctatttcaccataagccacaatactctctgacacaaccctttgcagattgtacaaaaccagtgatttctaactgctgaatgaaa

SEQ ID NO: 5879 - DNA, 153 bp, Protomyxzoa rheumatica
ccttggggaaaaactgaatatatccagataaaaactagaaagaagctatctgtgaaaatattttgtgatgtggggatccatctcacagaattaaactttcttttggtttagcattttggaaacactctttttgtagaatctgtgaagaaacat

SEQ ID NO: 5880 - DNA, 170 bp, Protomyxzoa rheumatica
attctcagaaagttccttgtgatgtatgctttcaactcacagagttgaacctttcttttgattgagcagatgtgaaacttcctttctgtaaaatctgcaagtattcattttgagcgctttgaggcctattgttgaaaagggaatatcttcacatgaaaactagacagaag

SEQ ID NO: 5881 - DNA, 286 bp, Protomyxzoa rheumatica
acaaaagcaaagttctatatacaaggatgttcacttcagtgtttttattaattgtgaacaatgtaaatcctcagtgttcatctgcagaagattgtttgaggctttcctttccacttagattacaatccatgctcattctcatcatctataaaacttatatgatttgcccccaagcctcatctcagacttaatcacccacctttttcctctggcttactttgttccaaatgcactgttttccttgttatttctcaaacaagccatgcatgacataatctcaaaacct

SEQ ID NO: 5882 - DNA, 146 bp, Protomyxzoa rheumatica
cgaatccattccattcgagaccattatattacattctgttccattctattccattccattacgttccaaatgattccaatctggttgattgcattttgttccagtccaatccattcgagtccattacatttcagtccattccaagg

SEQ ID NO: 5883 - DNA, 155 bp, Protomyxzoa rheumatica
ttctgacaaatttctttgtgatgtgtgcattcatctcacaggtttgaacctttcatttgattgaacggctttgaaaaactttgtacaatctgcatgtggaaatttggagcactttgaagcctatggtggaaaaggaagtatcttcatataaaaac

SEQ ID NO: 5884 - DNA, 142 bp, Protomyxzoa rheumatica
acgcacacatcacaaagtagtttctgagaatgattctgtcaagtttttatacaaatgtatttccttttctatggcctcaaagcaattgaaatctccaactggaaactgcccaaatagggtgtttcaaatctgctctgtctaa

SEQ ID NO: 5885 - DNA, 138 bp, Protomyxzoa rheumatica
aatggaatggaatggaatggaatggaatagaacggaacagaaccaagtggagtggagtggattggagttcaatgcagtgaatcggagtgcagtggaatggaatggaacagtattgaatggaatggaatgaagtggagt

SEQ ID NO: 5886 - DNA, 208 bp, Protomyxzoa rheumatica
aacattcagactatcgtagcagtgttctggaatcctatgtgagggacaaatattaagactatcatagcagtgttctggaatcctatgggaaggacaatcattcagaccctcgtaccactgttctgtaattccgtgtgagggacaaagctttaaaccaaagaaggagtgttctggaatcccctgtgaggaacaaacattcagaccctcg

SEQ ID NO: 5887 - DNA, 149 bp, Protomyxzoa rheumatica
atggacccgaatggaatcatcactgaatggaaaaaaaatggaaacaacatcgaatggaatcaaaaggaatcatctaatggacatgaatggaatcatcattggattgaatagaatgaaatcatcatcgaatgtaatcgaatggaatcatc

SEQ ID NO: 5888 - DNA, 125 bp, Protomyxzoa rheumatica
gggacaaatattcagaccctcttagcagtgttctggaatcttatgtgaatgacaatcgctcagaatccagcaccagtgttctgaaatcatatgtgaaggaaaaaccttcagaccagagcagtagt

SEQ ID NO: 5889 - DNA, 129 bp, Protomyxzoa rheumatica
tgagaacgcttctgtctagtttttatgtgaagatatatccttttccagcaaagtcctctatgctgtccaaatatccaattgcaaattctacaaaaagagtgtttccaatctgctctatcaaaagaaatt

SEQ ID NO: 5890 - DNA, 122 bp, Protomyxzoa rheumatica
gctttgagacgtgtgcattcaactcacagagttatacttatctttacattcagctgtttggaaacactggttttgtagaatctgcaaacacatatttcgagagcattgaggcctaaggtgaa

SEQ ID NO: 5891 - DNA, 177 bp, Protomyxzoa rheumatica
attcagtccaaggctgaagggaggaaaaaaaataatgtcttagcttgaaggcaatcatacaggaggaatttgggggagggtcagcatttttgttccattggattgaacaaaactggacaaggacaattggatgcagcccactgacattagggaggacactctgctttactcagtgta

SEQ ID NO: 5892 - DNA, 161 bp, Protomyxzoa rheumatica
gtctagtttttatgtgaagatattccttttcaaccgcaggcctcaaagccctctatatatacacttgcaaattccacaaactgctctatcaaaagaaaaattaaactgtggaagctgaatgcacacatcactaagtagttttagtttctgagaatgattct

SEQ ID NO: 5893 - DNA, 141 bp, Protomyxzoa rheumatica
taatatcaaatgttggggaataatataatgtgtttaattaaattataattttgctattataaataggataccaacgacatttctgaatatttttgtttagctctggtttctgaagtgtgtatctgtagccctgtgccgaga

SEQ ID NO: 5894 - DNA, 191 bp, Protomyxzoa rheumatica
gtcttacctgtatttctgggggacttcagaggtatgcctaattttcggttttataaacagataatgttctttagaccctcctcaaatgtgtataaaattgcagcatttgaactactgacgggatggcctgcagatctgacctaaggaattaggttttgatatgtgaagtttccatgggacatcagaaattc

SEQ ID NO: 5895 - DNA, 203 bp, Protomyxzoa rheumatica
agaagaagttagaaagtttttcaggtatgaatgacacccagattgtagaagtagccaccaaagtgttgttaaccgtgaccagaaatcaaagaaaggagcagattggaggcttaagatctgttggcagcagcccttatagaaaaagagattagcaatgtaatttgacgtggacgcagacttggatgtagaagaagtcaagttag

SEQ ID NO: 5896 - DNA, 149 bp, Protomyxzoa rheumatica
taggatctgggtgccggtataaggatctggatctgtcagtatctgaggaggtaggatctggcgctggtttgaggatctgagtctgtcaatgtctgaggaggtaggatttggtagacgtgtgaagatctgggtctctctatgtctgagca

SEQ ID NO: 5897 - DNA, 168 bp, Protomyxzoa rheumatica
gagctgagattgtgccactgcactccagcctgtgtgacagtgagatcctgttgaaagaaaggtatggattaaaatggaatggaattaaatggaatggagtggattggagtggaatttagcggaatgctgtggaatggaatgggatggaatggaatggaatggaatgga

SEQ ID NO: 5898 - DNA, 129 bp, Protomyxzoa rheumatica
aacgtttctctctgtcacgtgtggcgtccctacttctcgtatttccctgataagctcctcgacttaaaaatacatggttaaggccgggcgcggtggctcacgtctgtcagcccagcagtttgggaggcc

SEQ ID NO: 5899 - DNA, 147 bp, Protomyxzoa rheumatica
atggaatttaatcaacacgagtggaatggaatagaaaggaatggaatcaaccagagtagaatgtagtggaattgtatggaatggaatcaaatcgagaggaatggaagggaatggaatggaatggagtggaatggaatggaatggaaa

SEQ ID NO: 5900 - DNA, 144 bp, Protomyxzoa rheumatica
tttgtacactctgcttatggatatttggagctgtttggggatttcattgtaaacgaattatcttcaaataaaaactagatagaagtattctcagaaactgctttgtgatgtgtgaattcaactaagagaattaaacacttcttt

SEQ ID NO: 5901 - DNA, 123 bp, Protomyxzoa rheumatica
tcatctcacagacttcaaactttcttttgattgagcagttttgaaaccctctttttgcagtatctgcaagtgtatatttgaagcgctttgaggcctctggtggaaaaggaaacatcttcacat

SEQ ID NO: 5902 - DNA, 153 bp, Protomyxzoa rheumatica
tcctatgtgaggaacaaacattcaggccacagtaggagtgttctggaatcctatgtcagggacaaagattcataccctcttaacaatgttctggaatcctatgtgagggacaaacatttagacaccagcagcagtgttctataatcctctgtg

SEQ ID NO: 5903 - DNA, 135 bp, Protomyxzoa rheumatica
tttttatgtgaagataattcctttgtaaccataggcctcaaagtgaatgcacacatcacaaagaagtgtgtcagatgcttctgtctagttattatgtgaagatacttccttttccaccataggtctcaaagagct

SEQ ID NO: 5904 - DNA, 186 bp, Protomyxzoa rheumatica
gtcccaatgcaagagttacatgacctaggtgatcagtgaggagatacttcgctatgtccctgtaggcagagccttgacaagcggtacatcacctgggtgatcattgcagggatatgtctcaaagtaccctgtaagcagatcctgggaaagagttacatcacctgggtgatcagtgcagagatatgt

SEQ ID NO: 5905 - DNA, 234 bp, Protomyxzoa rheumatica
ggattccaatggaataatcatggaatggattcgaatggaaacatcatctaattgaatcatcaaacggaatagaattgaatcatcattgaatggaatcgagtagaatcattgaaatcgaatggaatcatcatcgagtggagtcgaatggaatcatcaattaatggaatcgaatggaatcatagaatggaatccaatgtaatcatcatcgaattgaactcaatggaataatcaaat

SEQ ID NO: 5906 - DNA, 123 bp, Protomyxzoa rheumatica
tggtggaaaaggaaatatctccacataaaaaccagacataatcattctaagaaaattctttctgatgtttgcattcaacaaagagagatgaacataccatttatagaatagttttgaaacact

SEQ ID NO: 5907 - DNA, 131 bp, Protomyxzoa rheumatica
ctctccctgccagtagggtttccactgtaaagtctgctgccagacgtgttggagctccccagtatgttatttgttccttttctctttcttcatttagaacttttctttatctttgcccttcggaagatcta

SEQ ID NO: 5908 - DNA, 126 bp, Protomyxzoa rheumatica
tttccattccattccgttcccttccattccactcgggttgcttccattcctttccattccagtcgattacattcccttctattgcattcggaataattccactccattccattccattccattcca

SEQ ID NO: 5909 - DNA, 174 bp, Protomyxzoa rheumatica
caaacttccctctcagcaatacttttgctgcatccctcaagttttggtttgtttgtttttgttttaattttctcaagatattttctaatttcccttgtgatttcttctttgacttactggttgtttaacaattaaattaacagtttaattttcatatattgtgaatttttaaat

SEQ ID NO: 5910 - DNA, 231 bp, Protomyxzoa rheumatica
atctctttttggaccacagttgactgtgggtaactaaaactgcaataagaaaagccacaagtaaggggggactaccataatagtaagagacttgaataccccactttcaataatggatagaacacctgacagaagatcaataaggaaatagaggacttgaacattgtagaccaactgatctaacagatatttaccaaacactccatccagcaacagtaaaacatatattat

SEQ ID NO: 5911 - DNA, 131 bp, Protomyxzoa rheumatica
cttccatcacctgggtgatcagtgcagagatatgtcacaactccccctctaggcagagaatacaaaagagtcccatcacctgggtgatcagtgtagaattatttcacaatgccccctgtaggcagagagtg

SEQ ID NO: 5912 - DNA, 128 bp, Protomyxzoa rheumatica
gtaactttagtctaggctctggatacacggcattgtgtcatatcactccactgatcacccaggtgatataactctcgtctaggctctgcctagagtggcattgtggcatatctctgcactgatcaccc

SEQ ID NO: 5913 - DNA, 157 bp, Protomyxzoa rheumatica
ggcctctgtggtcgcgagcttcggaagtggaggtgccccgtcttcagtttcccacgccgccctggcaacctggggctccagccccaccgcggactctggtgggatgtgggtggcgcaaacatactttgcccctgtgactcagcttgagggtacccaa

SEQ ID NO: 5914 - DNA, 279 bp, Protomyxzoa rheumatica
tcttcacataaaaactagacagaactattctgagaaacttctttgggatgtgtgctttcatctcacagagtaaaacattcttttgatcgagcagttttgtaagtctctttttgtagaatctgcaagtggacattttgagtcctttcaggtctatggtggaaaaggaaatatctacaaattgaaacttgacagaagaattctgagaaactcctttgtgatgcttgcatttatctaacagagttgaacctttctttatgattgagcagttcggaaaccctc

SEQ ID NO: 5915 - DNA, 200 bp, Protomyxzoa rheumatica
aaaagaaaaaagctgaattcactgccagtagacctgttcacatgaagtgttaaaggacatttttcaggcagaagaaatgtgaaaccaaacagaaactcaaagaaattaagagttcccaaaatgggaaaaagatgaaggtaaacataagactttttttcttatatttaatcactctaaaagataaattattgtctaaagta

SEQ ID NO: 5916 - DNA, 147 bp, Protomyxzoa rheumatica
ctcttcctgtgaagcttgacataattttcttctttaccttacccatttctcgtttcaaaagatctcggagaggtccttccggataatgccatctaaaatatccctgtcccaactctacttccctatccctaacacacattatctttt

SEQ ID NO: 5917 - DNA, 124 bp, Protomyxzoa rheumatica
aagtccattcaaagattccatttggttgcatttgaacatgattccatcggattccattcgatgaatccattcgattccactcgttgatgattccatttgataccatttgatgatgattccattc

SEQ ID NO: 5918 - DNA, 144 bp, Protomyxzoa rheumatica
atggaatggagaaatgaaatgtgagctgagattgtgccactgtactccaggctgggtcacagagtgtgatactctcgaaaggaaggaatggaatggaatgcagcggaatggaatggaatggagtggactggagtggagtggagt

SEQ ID NO: 5919 - DNA, 136 bp, Protomyxzoa rheumatica
aatatcttcacataaaaactagacagtagaattcggagaaacttctttgtgatgtgtgtgtttatttcataatgctgaacctttctttagattgagcagtaaggaaacactctttttgtagattctgcaagtggac

SEQ ID NO: 5920 - DNA, 150 bp, Protomyxzoa rheumatica
ggaatggaatcgaatggaatagaacggaattgatttgaatgaaacggaatggtgtggactcgaatggaatgtgttgcaatggaatggacacgaattgaatgaaatggagtggactcaaattgaatataatggaatggaatggactagaat

SEQ ID NO: 5921 - DNA, 126 bp, Protomyxzoa rheumatica
ctctgcactgatcacccaggtgattcaactcttgtctaggctctgcctacagaggcgttttaaaatatccctgaaatgatgacaaaggtcatgtaactcttgcctaggctttgcctacttgggaca

SEQ ID NO: 5922 - DNA, 127 bp, Protomyxzoa rheumatica
catctaagggcatcacagacctgttactgctcaatctcgggtggctgaatgccacttgtccctctaagaagtttcaggacgctgaccactctggggtcgcataatgagttagcatgccagagtctcg

SEQ ID NO: 5923 - DNA, 196 bp, Protomyxzoa rheumatica
cacaaggaaatttctcagaatgattctgtctagttttcatgtgaagataattctttttccccataggcatcaaacggctcagaaatatcccattgcagattgtacaaaaagatggtttccaatctgctcaatcaaaagaaaggatcagctctgtgatataaatccacacatcacaaagaagtttctcagaaagctt

SEQ ID NO: 5924 - DNA, 201 bp, Protomyxzoa rheumatica
ggagtgttctggagtcctatgtgtgggacaaacattcagaccctcgtagcagtgttctgtaatcctatgtgagggacagacatttagacccacatagcagtattctggaatcgtttgtgagggacaaacactcagaacccaacagcagtgttctgtaatccgaagtgaagaacaaacattcagaccacagcaggagtgttc

SEQ ID NO: 5925 - DNA, 277 bp, Protomyxzoa rheumatica
tatattttatgcaaagagtagctacaattggaggggcatggtcataattatattaaacaaaatatattttaagttaaaaattttaaaaagagacagattgttattatgtaacggtgagatggattaacttgcaagaaatccataacaataatttagaaatcatatatataatttgaaaaatctgcaaaaatataccactgagattttgacaaaaattacattaaatttttgtattactataaatagcactgacatctttctttcttttttttttttt

SEQ ID NO: 5926 - DNA, 142 bp, Protomyxzoa rheumatica
ttgtctttcatctgcttatgggggcattgtgacatatctctgaactgatcacctaggtgatggggctcttttctaggctctgtgtatggaggctttgtgacatatctctgcactgatctcccaggtgatcagtgcagagata

SEQ ID NO: 5927 - DNA, 153 bp, Protomyxzoa rheumatica
ttccaccaaaggcctcaaagtgctccaaatatccaattgcagattatacaaaaagagtgtttcagagctgctcaatcaaaagaaagtttccactctgtgagacgactgcacacatcacaaataagcgtgtcataatgcttctgtctagttatt

SEQ ID NO: 5928 - DNA, 164 bp, Protomyxzoa rheumatica
caaaagaattttcggtggtattgtgttaaaagatttttaactctcaccggtaatcactatcaattacaccaccatacactataatgcctctcattccaatgcttgcacgtgttgtaatccgttcatccacatttgagtttgcagttatggtggaaattttggcc

SEQ ID NO: 5929 - DNA, 290 bp, Protomyxzoa rheumatica
aaaaagagtgtttcaaaactactcaatcaaaggaaatattcaactcagtgagttgaatgcacacaacacaaagatgtttctgagaatgcttcagtcaagtttttatgtgaagatatttacttttccaacataggcctcaaatcgctccagaatccatttgcagaatctacgaaaagagtgtttcaaaattgctctataaaaagaaacgttcaactctttgaatagaatgcactcatcacaaagtagtttctgagaatgtttctgtcgactttttatgtgaagatattttg

SEQ ID NO: 5930 - DNA, 223 bp, Protomyxzoa rheumatica
tccattcgattccattctattcaaataaataccattcgagaccattgctttcaagtccattctatatgtgtccattccattcgagtccattacatttgggtccatgccaaaccattccactccattccattcgataccattccttttgattctattccattcgagtccattccattcgagtacatttcataccataccttttgattccattctattgcattcc

SEQ ID NO: 5931 - DNA, 225 bp, Protomyxzoa rheumatica
aaacattcagaccacagcaggagtcttctggaatccgttgagaaggagaaatattcaggcccttgtagcagtgctctggaatcttatgtgagggacaagcatgcagaacactgcaggagtgttctgaaatcctatgtgaggaacaaacattcagaccacactaggagtgttatgtaatcctatgtgagggaccaactttcagaccccagcagcagtgttctggaa

SEQ ID NO: 5932 - DNA, 206 bp, Protomyxzoa rheumatica
tccaggagatgtaactattctccaggctttgactaaagagcatcggaaggtgttgggagagcctcagccggaacttcatggatggacaagggcacagagaggccagcgggctcccttgcacgtcagccggggtgttcaatgagcccaggtctagccatgaggccggcaaagagagctagacgtgtgcgttccgtggccaggcgctc

SEQ ID NO: 5933 - DNA, 127 bp, Protomyxzoa rheumatica
cacttgcagattctacaaaatagtgtttccaaactgctcaatcaaaagaaaggttcaaatctgtaaggtgaagacacacatcacaaagaagtttctcggaattcttctgtctagtttttatgtgaag

SEQ ID NO: 5934 - DNA, 123 bp, Protomyxzoa rheumatica
aagatatttcctttttcaccataacctcaaagcgctcaaaaatgtccctttgaagattctacataaagactctttccaaaatgctcaatcaaaataaaggttcaaatctctgagatgaatgca

SEQ ID NO: 5935 - DNA, 194 bp, Protomyxzoa rheumatica
gtgacatatcactgcactgatcacctaggtgaggtaagccttgtatgggctttgactacaaaaggctatgtgacatatctttgaaccgatctctgaggtgatgcaactcttgtctaggcgctgcctacacgggacattggtacatttctctgcacttttcacctaggtggtggacccttgtcttagatctgcct

SEQ ID NO: 5936 - DNA, 266 bp, Protomyxzoa rheumatica
aactgctctatcaaaagataggttcaactatgtgagatgaatgcacaaatcccaaacaagttcctcagaatgcttctgtgtagttattatgtgaagttatttccatttcaaccattgacttctaagctctccaaatatcctcttacatattctacaaaaagagagtttcaaaactgtccaatcaaaagaaatgttcaacactgggagatgaatacacacatctcaaagaagtttctcagaatgcttctatccggtttttatgtgaa

SEQ ID NO: 5937 - DNA, 187 bp, Protomyxzoa rheumatica
atgattccattcgtgtccattcgatgattctgtttgataaaattggatgatgattccatttgattgcattcgataattccattctattccattcaatgatgattgcattcgagtccattcgattattccatttgagtccacttgattattccattgagtttaatttgatgatgattacattggattc

SEQ ID NO: 5938 - DNA, 139 bp, Protomyxzoa rheumatica
gggatttttgtgacatatcactgcactgatcacctaggtgttgtaagccttgtatggactttgtctacagaaggctttgtgacatatctatgcaatgatctctaaggtgatgccactcttgtctaggcacagcctacag

SEQ ID NO: 5939 - DNA, 199 bp, Protomyxzoa rheumatica
tttatgtgaagatatttccttttccaccataggcctcaaatcgctccaaatatccacttgcaggtagcacaaaaatactctttaaaaactgctctctcaaaaggaagtttcaactctgtgagtagaatgcacacatcccaaaaatgtttgtgagaattcttctgtctcgttttcatgtgaaaatatttgcttttccacc

SEQ ID NO: 5940 - DNA, 219 bp, Protomyxzoa rheumatica
ctgtgagatgaaagcacgcatcatgaagaagtttctcagaaagtttctatctagttattgtgtgcagattcttcctttttcaccttatgcctcaaagcgctccaaatatctgtttacaggttctacaaaaagagtgtttccaaactgctcaatcaaaggaaaggttcaactctgtgaaatgaaagggcacatcacaaggaagtttctcagaatgcttct

SEQ ID NO: 5941 - DNA, 188 bp, Protomyxzoa rheumatica
tgtgatgtgtgcattcatctcacagagttgaacctttcttctgattgagcagtttggaaaaactcttttcatagaatcttcaagtggatatttggagcactttgaagtccattgtagaaaaggaaatatcttaacataaaaactacagaaaagcattctgagaaacttctttgtgatgtgtgcattca

SEQ ID NO: 5942 - DNA, 164 bp, Protomyxzoa rheumatica
atctcagagagttaaaattttctcttcattctgaggtttggaagcactgtttttgtagaatgtgcaaatggatattgcgagcacattgaggtatctgttgataaaaagaaatatattcaagtaaaaactagaaagaaggtctctgagaaacctctttgtgatgt

SEQ ID NO: 5943 - DNA, 174 bp, Protomyxzoa rheumatica
catcaatgaatggaatcgaatggtgtcatcgaatggaatcagttggaatcatcatcaaatggaaccgaatgcagacatcatcgaatggaatcggatggaattatcgaatggactggaatggaatcatcattgaatggtatcgaatggagtcttcgaatagactcaaaagcaatc

SEQ ID NO: 5944 - DNA, 239 bp, Protomyxzoa rheumatica
tgtaaaaaaaaaaggatgcactacaatgtgggacaggtaattttgcaaaacacatttaatgtcattttcaatcatttagaaaagaacttctcttccccgaataaatcagcggggcggggctcgtcgaagctgcactttctgattcagcagacctgagattcttcatttgtaataaattctcgggtgatgctgatgctgctgatctggaacatgatcttcgcagtaatattatacacttc

SEQ ID NO: 5945 - DNA, 125 bp, Protomyxzoa rheumatica
cgttgccaccttcatgtaaatgtgatgtatcaaaagtgctttgtaaactgttaaattccaatgttgatatggttatagatataccttattaaatactggataatgattttataagctacagggtg

SEQ ID NO: 5946 - DNA, 141 bp, Protomyxzoa rheumatica
attccattccattccattactttcgattccatgtcgtactattgaattcattttggtttcgttctatttgaataacttccactcgagaccattccattccagtccattctatttgagtccattccatacgagtccattata

SEQ ID NO: 5947 - DNA, 244 bp, Protomyxzoa rheumatica
taactttctgagaggaatccaaatccaccaaagcagtttcacagcttccttctagttttattttgagaatatacagttagtcaccgagggcatcaatgcactccaaaatgtcccttcacagattctaccaaaaacgtgtttccaacatgttgcatcaaaaggaaggttgaactctgtgagatgaatccacacatcacaaagcagcttcaaagatagcttccttctagtgtttatctggggatat

SEQ ID NO: 5948 - DNA, 152 bp, Protomyxzoa rheumatica
ggagtggagtggaatggagtggagtggaatggaatggaatggaatgaaattaaatgcaatggtgaaatgaaatgtgatgtgatattgtgctactgaactccagcctgggtgacagtgtgagatcctctcaaaagaaaggaatggaatggaat

SEQ ID NO: 5949 - DNA, 137 bp, Protomyxzoa rheumatica
ggacatttggagcactttgagacctatggtggagaaggaaatatcttcacataaaaacgagaaaaaagaattctgagaaactcctgtgttgagtgtgttcatctcacagagttgagcctttctttttattgaacagt

SEQ ID NO: 5950 - DNA, 84 bp, Protomyxzoa rheumatica
ataccattcctttccgatccattcaatcgtagttctttccatttgattgtattccatttgattccattccatttgattaccttc

SEQ ID NO: 5951 - DNA, 123 bp, Protomyxzoa rheumatica
cataaggccctattaaatgtttctttctgagaaattggatttgtcagcctctttcttcagcctctcagctcccttggcctttggggataggtttgcatagacctgctcaccatggcacagaga

SEQ ID NO: 5952 - DNA, 127 bp, Protomyxzoa rheumatica
catctcacagagttaaatctttcttttgattcaaaagcttgggaacagttttttcaagaatctgtgaagagatacttgggagcccattgaggcatatgggtaaaaactgaatattttcatataaaaa

SEQ ID NO: 5953 - DNA, 142 bp, Protomyxzoa rheumatica
tcaaatgttatggactggaatcgaatggactcgaacgtaatggactggaatggaatggactcaaaaggaatgtattcgaatgtaatagactcgaaaggaattgactcaaatggaatggaattgattggaatggaatacaatt

SEQ ID NO: 5954 - DNA, 123 bp, Protomyxzoa rheumatica
ggaatggacttgaatgaaaaggaaacgaatggattgcaatggaatggaatgcaatggaatgtaaaggaatagaaagtaatggaattggatagaactgaatggaatggaatggagtcgaatgga

SEQ ID NO: 5955 - DNA, 147 bp, Protomyxzoa rheumatica
caaggaaggtacctgagaaaccactttgtgatgtttgcattcatctcacagagtcaaacatttccttgcaatcagcagttttgaaacactgtttttgtacaatcttggaagtgatatttgggagtgcatggagatctatggtgaaaa

SEQ ID NO: 5956 - DNA, 254 bp, Protomyxzoa rheumatica
gacatggacagacccagatcttcacacttgtaccagatcccacctgctcagacactgacagacccagatcctcatacctgtacctgatcctacctcctcagatataaacagacccagatcctcacacttgtaccagatcctacctccagacatggagagaaccagatcttcatacctgtatcagattcgtacctcctcagatattgaacgacccagttcctcaaaccaaggccagatcctacctcctcagatac

SEQ ID NO: 5957 - DNA, 168 bp, Protomyxzoa rheumatica
ccctcacataggatcccagaacactgctgctgaggtctgcatgtttgtccctcacataggattccataacactgctgtgggcttctgagtgcttgtccctcacataggactccaggacactccttttgttgtctgaatgtttgtccctcacataggattccagaacac

SEQ ID NO: 5958 - DNA, 206 bp, Protomyxzoa rheumatica
cagtcacctacacacttatttcgatgctctgatcccttatcttagctagtcaaagcgtggtctatgagtttgcattttaataagatcccctggtgaatcttgtgcatgtcaaaggaagagaagaactgccctcaaaatatagagcaggtgaactaaattattaacttatagaggtaggctggctatttatttatgtatcttgttga

SEQ ID NO: 5959 - DNA, 223 bp, Protomyxzoa rheumatica
cacagggtgcaaagagctccaaatatccacttgcagattccacaaaaaaagagatatgaaagtgctccatggaaagataagttcaactctgtgagttgaatgcacacctcacaaagaagtatctcaaaatgcttctgcgtagtttttatgtgaagatatttccttttccaagtaggcctcaacgttctccagatatccactcgcagattctgcaaaaagagag

SEQ ID NO: 5960 - DNA, 227 bp, Protomyxzoa rheumatica
agggttgaaacttcctttttgtacagcatttttgagacactcttttcgtagtatctacaagtggacacatagagtgctttgaggcctatggtggaaacgggaatatcttcacgtaaaaatgtgattgaagcatactcagaaactattttgtgaagtgtgcatccaactcagaattgaaatttccttgtgttgttgcagttttgcaacactctttttgtagaatttgc

SEQ ID NO: 5961 - DNA, 156 bp, Protomyxzoa rheumatica
agaatctccagtggatatttggactgctttgaggccttggagacgagattatcttcacattaaaactaggcagaagcattctcagaaacatctttgttatctgagcattcaactcacagagttcaacctttcttttgatagagcagctttgaaaca

SEQ ID NO: 5962 - DNA, 172 bp, Protomyxzoa rheumatica
actcgaatgcaatggaatggaatggactcgaaaggaacggaatggactcgaaagagtggagtcgaatggacttgaacggattgcaatggaatggaacagaatggaatgtactcgcatggaatggaaatgaatggaatagaacggaacagaacggaatggaattgactggaat

SEQ ID NO: 5963 - DNA, 201 bp, Protomyxzoa rheumatica
gccttcgttggaatcgtgaatatcttcacctaaaaactagacaggagcattctcagaaatttctttgcgttgtgtgcgttcatctcacagaattgagccttccttttgatagatcagttttgaaacactttttttttatattctgcaagtggatatttggaccgctttgaggccttcattggaaatgggaatatcttcaaa

SEQ ID NO: 5964 - DNA, 250 bp, Protomyxzoa rheumatica
gaatgcatacatcacaaagaattttctcagaatgattctgtgtagtttatatttgaagatatttccttttccaacgtaggccttaaagagctccaaatatccacttgaagattctacaaaagagagattcaaaactgctcaataaaaagatatgttcaactctatgagttcaatgcactcatcacaaagaagtttatcagaatacttctgagtagttgttatgtgaagatatttccttttctaccatatg

SEQ ID NO: 5965 - DNA, 373 bp, Protomyxzoa rheumatica
aaaaagactgtttccaaactgctcaatcaaaagaatggtttaactgtttgagatgagtgcactccaaacacagaagtgtctcagaaagattctgtctagttttcatgtgaatatatttcctttttcaccattggcctccaagtgttcacaaatatccctttgcagattctacaaaaagacgatttccaatatgttcaatcaacagaaaggttcaaatctgtgagactaattcacacgtgacaaagcagtttctcagaaaccttctttctagtttttctctgaagatatttcctttttcatcataggcttcaaagtgttcacaaatatccttttgcagattctacaaaaagactcttaccaaattgctcaatca

SEQ ID NO: 5966 - DNA, 171 bp, Protomyxzoa rheumatica
ggaagatatttcctttttcaccataggcctcaaagtgctctaaatatccatttgcaggtgagaaaaagacggtgtccaaacttctcaatcaaaagaaaatttcagctctgtgagatgaatgcacatatcacaaagaactttctcagaatgcttcttgcttgttttcatgtg

SEQ ID NO: 5967 - DNA, 87 bp, Protomyxzoa rheumatica
agcgatttgaggcctatgatggaaaaggaaatatgttcacttacaaactagacagaagcattctcagaaactgctttgtgatgtgtg

SEQ ID NO: 5968 - DNA, 134 bp, Protomyxzoa rheumatica
gcagtttctcataatgcttctttcaagtttttatccaaagatatttcatttatcaccttaggcttcaatgcactccctaatgtccctcctcagattctacaaaaccacgttttacaaactgctcaatcaaagaa

SEQ ID NO: 5969 - DNA, 170 bp, Protomyxzoa rheumatica
aagttaatctttgacaaaggcgctatgaatactcaatacaaaaagtgtagccttttcaatacttagtgctgggaaaactggattctcgcaagcacaataataacacttgatcatatttcttatgccagacataaaaattgacttaaaatacttaatacataaatccttaa

SEQ ID NO: 5970 - DNA, 161 bp, Protomyxzoa rheumatica
taaaagcatccaaattggaaagaaggaagttaaattgtttttatttagagatgacataattttatataaagaaatctctagagattccaccaaaaaaatgttaggagtaataaataaattcagaaaagttgcagaatacaaatcagtagcatttctatatg

SEQ ID NO: 5971 - DNA, 123 bp, Protomyxzoa rheumatica
caactcttttctagtctctgcctaaagagggctttgtgacatcactctgcacggattaccctggttatttaactctagtctaggctctgcctatgggtgcattgtgacttatctctgcactta

SEQ ID NO: 5972 - DNA, 192 bp, Protomyxzoa rheumatica
tagggtggagaaaaccccaccctggtgaatttcaggtcagaccggttctctgctctcaaaccctgctgtctgttaagatgtttatcaaggcaatgcgtgcaccactgaacatagacccttatcagaacttctggtttgcccttgtcctgtttcctcagaagcatgtgatctttgttctcctttttgccgttt

SEQ ID NO: 5973 - DNA, 140 bp, Protomyxzoa rheumatica
cattctcacaaacttctttgtgatgtttgattcaacacacagagttgaacatacgttttcatagagtagttttgaaacacacttttcgtagaacctgcaaggggatattttgatggcattgaggccttctttggaaacgg

SEQ ID NO: 5974 - DNA, 214 bp, Protomyxzoa rheumatica
aactctttttggagaatctgcaaatagacattttggaacaccttgtagcctatggggaaaaaccaaatatcctcataaaaaaactagaaagacgctaactgtgaaactactttataatgtgtacattcatctcacagagttaaagcttttattgattcagaaggttagaaacattctttttggagaatctgttaagggacatttaggagccaat

SEQ ID NO: 5975 - DNA, 168 bp, Protomyxzoa rheumatica
ccatcacctgggtgatcagtgcagagttatgtcacaatgcccccttttggcagagcctagactatggttacattacctgggtgatcagtttagggatgtgtcataagccccctgtagccagagcctagacaagagttacatcagctgtgtgatcagtgcagtgacatg

SEQ ID NO: 5976 - DNA, 138 bp, Protomyxzoa rheumatica
tggaatcctatgtgagggacaaatattcagacagcagccgtagtattctggaatcctatgtgaaggatagtcattcagaccctcatagcagtgttctggaattctctgtgtgggacaaacattcagaccctcatagca

SEQ ID NO: 5977 - DNA, 145 bp, Protomyxzoa rheumatica
tgcatataatttgggttaatgggtagcattagaataaaccaattaagactacattgaatgaaagtgcaagtgagcagtggaaatatttgtcagagaatacaattgtgaacaatctgctacaaattctccatgtacagatgaattg

SEQ ID NO: 5978 - DNA, 161 bp, Protomyxzoa rheumatica
gagttgaatgcacacatcacaaagaactttcttaggatgcttctgtctagcttttatatggcgtttcccgtttccaacgaataccccaagatttccaaatatccgcaagcagattccacaaaaggagtatttcaatactgctctatcaaaagacaggttca

SEQ ID NO: 5979 - DNA, 168 bp, Protomyxzoa rheumatica
agcccatggcagaaaacagcttaaagacattcttgaaccacaaacaatagcatgagtgatctgtgatttaagggcaggttactgctgcagatggctaaccagatccaaccctatatttcagcccatcccttcatttcccataagaaacacttttagttaatcgaatga

SEQ ID NO: 5980 - DNA, 214 bp, Protomyxzoa rheumatica
caaatatccacttgcagattctacaaaaatagtgtttccaaacttctcaataataacataggttcaactctgtgatattaaggcacacatcacatagaagtttctcagaatgcttccgtgagtttttatttgaagatatttccttttccactgtatgctgcaaagggcaccaaatatccacttgcagataataaaaaaagtgagattcaaaacc

SEQ ID NO: 5981 - DNA, 226 bp, Protomyxzoa rheumatica
ttccattccataaaattccattccgctcaattctacttcactcccctccactccactcaaatccactccattcgtttccattccactccatttcattccattaatttctttcaacaggatctcaccctgtcacccaggctggagtgcagtctcacaatctcagctcacctttgattgcaccattccatttcattccattccactccactacactacactccattcc

SEQ ID NO: 5982 - DNA, 131 bp, Protomyxzoa rheumatica
aaaactgctctatcaaaaggaatgttgaactctgtgagttgaaaggaatcttcacaatgtagtttctgagaatgtttctgtgcagtttttatgtgaagatatttacttttctaccataggcctcaaagccc

SEQ ID NO: 5983 - DNA, 127 bp, Protomyxzoa rheumatica
tatattcctttccatgcgagtccattccattctaatccattggagtacttttcattccattcctttagagtccattccattaaattccattctattcaattcgggtcctttccattcaattccattc

SEQ ID NO: 5984 - DNA, 143 bp, Protomyxzoa rheumatica
cactccactccactccattccattccactccatcccattccattcgacaacattccactaaactccactcaactcaattccattccattccgttccataccatttcactccactgcattccatagcttcctttccataggata

SEQ ID NO: 5985 - DNA, 124 bp, Protomyxzoa rheumatica
tcgagggccatgaaggctatggtggagaaggaagtatcttcacataaaaacaacaaagaagcattctgagaaacctatttgtgatgtatgcattgaactcgcagagttgtacctagctgttgat

SEQ ID NO: 5986 - DNA, 128 bp, Protomyxzoa rheumatica
atcaaatggacttgaatttaatcattgcatggactcgaatggtatcatcgaatggactcgaaaggaatcatcatggaatgaaatctaatggaatcaccaactggacacgaatggaatcatctttgatt

SEQ ID NO: 5987 - DNA, 243 bp, Protomyxzoa rheumatica
aattggcaagtggatattatgagcgctttgaggcctactttggaaaagcacatatcttcacctaaaaactacacaaaagcattctgagaaacttcttcgtgatgtgtgagttcacctcacagaattgaacctttcttttgattgagcagctttggaacattctttttgtagaatctgcaagtgggtatttgcggtgttttgaggactatttaggaaaaggaaatatcttcacataaaaactac

SEQ ID NO: 5988 - DNA, 123 bp, Protomyxzoa rheumatica
tgcttctgtctagtttgtatgtgtagatatcccgtttacaatgaattcctcaaatagatcaaaatatccacaagcatattgtacaaaaggtgtgtttcaaaacttctctatcaaaagaaaggt

SEQ ID NO: 5989 - DNA, 267 bp, Protomyxzoa rheumatica
cagatttgtcctgttcattctctaaataaaatatatagtgtctgtcaacttcagcatttccatatctcctctttttctttccccgagccaccagaaatgactctaatagttttatacacttgagcttaaatacatctagagcaaggaggtctttctaaaatgagtaacatgaaaatacattatgtggcagactactgtgtgatgatacaactcattaatatacgtaacagtaacttctgcgacacaagtgaaatccacaggaaaaaa

SEQ ID NO: 5990 - DNA, 147 bp, Protomyxzoa rheumatica
tggaatggaaaggaatgcaatattttggaatggaatgaaatagtatacattggaatcaaatggaatggaatcgaatgtattggagtggaatggtatggactggtatagaaagtactcgaatgtaacggattgcaatataattgattc

SEQ ID NO: 5991 - DNA, 493 bp, Protomyxzoa rheumatica
gccacaaagcgctccaaatgtccacttgcagattctacaataagagcattgcctaactgctcaatcaaaagaaatgttcaaatctgtgagattaacgcacacatcacaaataagtttctcacaattcttctgtctagtttttatgtgaagatatttctgtttccactataggcctcagagccctccaaatgtctacttgcagattctacacaaagagagtttcaaaactgctcaattaaaagataggtttaaacctgtgagatgaatgcacacgtcacaaagaagtttctcacatggcttgtgtctagattttatgcaaagatattccttttctaacataggccacaaagtgatccaaatgtccacttgcagattctacaaaaagagtgttttaaaactgctcaatcaaaagaaagtatcaactctgtgaggaaatgcacacatcacaaagaagtttctcagaatgattctgtgtagtttttatgtgaagata

SEQ ID NO: 5992 - DNA, 182 bp, Protomyxzoa rheumatica
tcctctaacaaaagataggttcaactctgaattgaatgcacacatcaaaagcagtttatcagagtaattctctgtagtttttatgtgaagatatttccttttccaccattggccaaaatgccctccaaatatccacgtgcagattctatgaaaagagtgtttccaaactgctcaatcaaaag

SEQ ID NO: 5993 - DNA, 205 bp, Protomyxzoa rheumatica
ctcaaatggaatggagtggaatggattcgaatagaatggaatggaattgactagaatgcaatagaaaggaatggactcgattggattggaatatgatggaatggatcaaatggaatgtagttaaaaggaatcgaaaggaattcgtatggaattgaatggacacgaattgaaaggaatgtaatggaatggaatggactcgaaagga

SEQ ID NO: 5994 - DNA, 151 bp, Protomyxzoa rheumatica
tgaggcctaccatggaaaagcaaatatcttcagataaaaactacgcagaagcaatctgacaaacttctttgtgctgtgtgcattcatctgacagagtggaaattttcttttcattgagcagtttttaaacactctttttctagaaactgca

SEQ ID NO: 5995 - DNA, 128 bp, Protomyxzoa rheumatica
aagtttctgagaatgtttctgtctacttttcttgggtagatatttcctttttcaccataggcctcaaatcgctccaaatgtcctcttccagatactccaaaaagagtgtttcaaaagtgctctatgaa

SEQ ID NO: 5996 - DNA, 155 bp, Protomyxzoa rheumatica
atatctctgcactgatcacccaggtgaggtaacgcttgaataggctctgcctacggggcgtagtgaaatatcactgcattgatcaccgaggtgatgtaactcttgaccaggctctgcctataaggggtcttgtgacatatctctgcactgatcat

SEQ ID NO: 5997 - DNA, 227 bp, Protomyxzoa rheumatica
cataaaaactagacagaagaattctgagaaacttctttgtaatgtgtgcgttcatctcacagaggtgaacttttcttttgatagagcagtttcgaaacactctttttttagaatctgcaagtgaacattttgagcgatttgtggcctatggtaaaaagaatgaaatatcttaacataaaatctacacggaatcaatctgagaaacttctttgtgatgtgggcattca

SEQ ID NO: 5998 - DNA, 277 bp, Protomyxzoa rheumatica
tgtggtctgaatgtttctcccgcacataggatgacagaatactgctgagagggtctgaatgattgtccctcaaataggattccagatcaatgctgctggggtctaaaggtttgtccgtcacatcggattccaggttactgctacagggttctgaatgtttattcctcacaggggattccagatcactacttctgtgttctgaaagtttgaccctcacgtaggattctggaacactgccatgattgtctgaaagtttttccctcacacagaattccag

SEQ ID NO: 5999 - DNA, 163 bp, Protomyxzoa rheumatica
ttccaactaaggcctcaaagacgtcaatatatccagttgcagatacttcaaaaagagtgtttcaaaactcctctatcaataggaattttcaattctgtgagttgaatgcaaacgtcacaatgtagtttttgagaatgcttctgtctagtttttatgtgaagat

SEQ ID NO: 6000 - DNA, 133 bp, Protomyxzoa rheumatica
ctgctctggtctcagtgtttgtccctcaaataggattccataaaatttccactggggtctgaatgtttgtccctcacttagggttccagaacaatactaagagggtctgaattattctccctcacatatgatt

SEQ ID NO: 6001 - DNA, 148 bp, Protomyxzoa rheumatica
gccaaaggtagaaaaggaaacatcttcgtataaaaactagcagaatcattcgcagagactgccttgtgatgtgtgggttcaactcacagagtttatcctttcttttcattcagcagtttggaaacagtctgtttgaaaagtctgcatg

SEQ ID NO: 6002 - DNA, 140 bp, Protomyxzoa rheumatica
tcacataggactccaaaacactcctgttgtgttctgagggcttgtgcctcacatcagattccagaacagtcctgctgtggtctgaatgcttctcccacatataggtttgcaaaacactgctgctggattcagagtgtttg

SEQ ID NO: 6003 - DNA, 138 bp, Protomyxzoa rheumatica
tccattccattctattcctttatatttcattcccttcctttccattccatgacattccattcgtctccattccattcgagcccattcctctccagtccattccattcgcgtgaattccattacagtcctttccattcg

SEQ ID NO: 6004 - DNA, 151 bp, Protomyxzoa rheumatica
tggaatggaaaggaacggaatagaatggaatgtaatcggatggaaccaaatggaatgaaatcaactcgaatggaatataatcgaatggaatttcatcaaatggaatggattggacttgattggaatggactcgaatggaatagaaaagaat

SEQ ID NO: 6005 - DNA, 154 bp, Protomyxzoa rheumatica
ttctcagaaacttctttgagatgttttcattcatctcacagtgttgaacattccctttcatggaagagttttgaaaaactctttttgtaatatctgcaagtggacattttgagggccatgaatcctatgctgaaaaaggaaatatcttcacata

SEQ ID NO: 6006 - DNA, 124 bp, Protomyxzoa rheumatica
agtacgcacatcacaaagtagtttctgagaatgctcctgtccaatttttatgtgaagatatttcgtttatcgccatacatctcaaatcgatacaaatgtccacttgcagattctacaaaaagag

SEQ ID NO: 6007 - DNA, 163 bp, Protomyxzoa rheumatica
attgctgagtgaataatcatgtataaagttatcctcacttcattgttaaagattaaaatattatctaggcttttataaagcacattaagattgcatgcaatgcactaaattaacaaaatattatttttaagaaataaaaataaggtaaaatgataatgtaata

SEQ ID NO: 6008 - DNA, 189 bp, Protomyxzoa rheumatica
agatacaatgggagtataagcattgggcaaacatttccattttaaaagggaaaaattggctaaaagagaggggctacatgccccaaacaaatttaaaacccagcagtgtagtcattaaatcttaaagctccaaaataatctcctttgaccgcatgtctcacatctaaggcacactggtataagggatgg

SEQ ID NO: 6009 - DNA, 154 bp, Protomyxzoa rheumatica
attcctctttgtgttgtgtgcattgaactcacagagttgaaccttcttttctatacagcagttttgaatcactctttttgtagaatttccaagtggatatttagagcgatttgaggcctattgtggaaaaggaaataccttcatagaaaaacta

SEQ ID NO: 6010 - DNA, 268 bp, Protomyxzoa rheumatica
ttcgagtccattcaatgattcaattcgattccattcgatgctgattccattcgaatccatttgattattccattgaaatcccttctttgattccatccaattccatttgatgatgattccattcgagtccaatctatgattccattcggttccattcaatgattccattcgagtccatttatgtattatattcgtgtccacttgatgactcactccattcaattccatttaatgatgattccatttgattccatttgatgattcagtt

SEQ ID NO: 6011 - DNA, 123 bp, Protomyxzoa rheumatica
gaacccaacagtagtgttctggaatcctaagtgagggacaaacactcagactgcagcaggagtgctcttgaatacttagtggggaacaaatattcagacaacagcaggagtgttctggaatcc

SEQ ID NO: 6012 - DNA, 191 bp, Protomyxzoa rheumatica
ctctttttggagaatctgtgaagggacatttgagggccctttgaggcctatggggaaaaactgaataggcccatttaaaaactagaaagaagctatgtgtgaaactgcttgatgatgtgtggattcatctcacagagttaaaacttttctttgattcagcaggttggaaaaaccctttttggagaatctgt

SEQ ID NO: 6013 - DNA, 250 bp, Protomyxzoa rheumatica
atgaagatttctgaaatgcctttgaggccttttccccattgtcttggatattagcacttggatcccttttagttatgcaagtatctctagcaagtggttgttccacagcctgcttgaattcccctcataaaaaagcttgtttttctttgccacatggctatgctgcaaattttccaaactttcatgctctgctgcctgtttaaatagaagttccaactttaagtcattgcttggctcctgcatctgaaat

SEQ ID NO: 6014 - DNA, 144 bp, Protomyxzoa rheumatica
atgtgctggttttggtggggacatgtttttaattcatcttggagtaccaaagagtacaattgctggatctttggtaagagaatgtttactttttaagaaactgccaaactgtcttcgaaagtggttgtaccattctgcattcct

SEQ ID NO: 6015 - DNA, 126 bp, Protomyxzoa rheumatica
acacaatgaccccatagacagagactagacaagaattccatcacctaggttatcagtgcagagatatgtcatgaatccacctctaggcagagtatagaaaatagtcccatcacctgagtgatcagt

SEQ ID NO: 6016 - DNA, 123 bp, Protomyxzoa rheumatica
cgatgattccattcaattccatttgatgatgattccattataatccatttgatgactccattcgattctattcgatgatgactgcattcggttccatctgatgatgattccaatggattccat

SEQ ID NO: 6017 - DNA, 218 bp, Protomyxzoa rheumatica
gtaatggaatggaaaggaatggaatggaatggaatggaatagaatgaaatagaatggattggaacagaatggaatggaatggactcaaatggaatggacttgaatggaacacagtggaatttactggattagaatctaacggaattaactgtgatgaaaaggaacggaatggactcgaatggaatcgattggaattgaatggacgtgaatggaatgaa

SEQ ID NO: 6018 - DNA, 131 bp, Protomyxzoa rheumatica
gtttttatgtgaagatatttccttttctactgaatgcttcaaagctctctaaatatacatttgcaaattccagaaaaagagggcttcaaaactgctctatagaaagcaagcttaaactctgtaagctgaat

SEQ ID NO: 6019 - DNA, 128 bp, Protomyxzoa rheumatica
tcgtttcgagtccattctatttgaatacattccattcaagtccattacatttgggttcatcccattctattccattcgttgccatcccatccaattctattccatttgaatccatcacattcgagtcc

SEQ ID NO: 6020 - DNA, 183 bp, Protomyxzoa rheumatica
tgcttctgtgtagtttctatttgaagatatttccttttcctccatagaccacaaattgctccaaatatccacttccagattctagaaaaagagagatccaaaattgctcaatcaaaagaaaggttcaagactgtgagttgaagacacaaaccacaaagaagtttctcagaatgcttctgtgta

SEQ ID NO: 6021 - DNA, 122 bp, Protomyxzoa rheumatica
gtgtgcatttatctcacagagttgaacctttctttggattatgtagtttggaaacagtcttattgtagaaacttcaaagggatatttgtgagcccttggaggcctacagtgtaaaaggaaat

SEQ ID NO: 6022 - DNA, 169 bp, Protomyxzoa rheumatica
aatttttatgtgaagatatttccttttccaccataggccttaaagcacaccaaatatcgaattgcagatactacaataagattatacccaagctgctaaaacaaaacaggtgttcaactctgagttgaatgcacacttaacaaagaagtttctcagaatgcttctgtct

SEQ ID NO: 6023 - DNA, 136 bp, Protomyxzoa rheumatica
gttgaacatttcttttgtttgagctgtttgggatcattctttctgtagaatctgcagtggatatttagagagttttgaagcttatggtgtaaaagtaaatatcttcacataaaaactatgcagaagcattctgaga

SEQ ID NO: 6024 - DNA, 244 bp, Protomyxzoa rheumatica
ggaatggaatagaatggagtgaagtgcagtgcagtgaaatggagtggaaaggaatggaatggaaagaattgaatcaaatggaatcgaagtgaatcgaatctaatgaaattgaacgcaaaaaatggaatgagtagaatcgaaaaagatggattcaaatggcaacaaataaaattgaatggaatgcggtgaggtggaggggattggaatggagttgaatggaatggggtgtaattgaattgaatgg

SEQ ID NO: 6025 - DNA, 130 bp, Protomyxzoa rheumatica
ggtaatttggccctctttgaggccttcgttgtgaaagggaattcttcatataagcaagacagaagaattatcggaaactactttgtgatgtgtgcgttcaacttacagagtttaacctatcttttgatag

SEQ ID NO: 6026 - DNA, 126 bp, Protomyxzoa rheumatica
ccattccattacactccattccgttccattcctttctttccacaggatctcaccctgtctcccaggctggagtacagtggcaaaatcccagctgacatttcatttcaccaatcccttccactgtat

SEQ ID NO: 6027 - DNA, 154 bp, Protomyxzoa rheumatica
ccactccacttcactccactccattccattccattccattatactccaatcaattctattcctttcttttgacagaatctcactctgtcacccagggtggagtgcagtgaaactatttcagttcacatttcatttcaccattccattccattcc

SEQ ID NO: 6028 - DNA, 143 bp, Protomyxzoa rheumatica
gaatatatttccttttctaccataggcctagatctgctctaatatccacttgaaaatactacaaaaagagtacttcaaaactgttctatcgaagggaaggttcaactctgtgacttgaatacacacatcacaaagaagtttct

SEQ ID NO: 6029 - DNA, 137 bp, Protomyxzoa rheumatica
tgcttctgtctagtttttatgtgaagatatttccttatccaccataggcctcaatgcactacaaaagtccacttgcagatagcacaaaaattgtgtttcagaactggaaagaaacattctgacaaacttctttgtga

SEQ ID NO: 6030 - DNA, 146 bp, Protomyxzoa rheumatica
gtgaggaaaatacattcagaacacagcaggagtgttctggagtcctatgtgcgggactaacattcagaccctcatagcagtgttcagatagcctatgtgagggacaaacatttagacccacgtagttatgttctggaatcgtacgt

SEQ ID NO: 6031 - DNA, 249 bp, Protomyxzoa rheumatica
ctcacagagtagaacctttcttttgattgagcagttatgaaatacactttttgtagaatgttcaagtggatatttggagggctttgaggcctattgtggaaaagttaatatcttcaaataaaaactactcagaatcattctgagaaactactttgtgatctgcgaattcatctgaaagacttcaaaatttcttttgtttgggcagtatggaaacactctttttatagaatctgcaagtgaatatttgga

SEQ ID NO: 6032 - DNA, 142 bp, Protomyxzoa rheumatica
agtagtttggaaacactgtttttgctgaagctgcaaagtgatatttagaagagcatcgaggcctatcataaaaaaggaaacatcttcagataaaaagtagaaagaagttctctgagaaactgctttgtgatgtctgcattca

SEQ ID NO: 6033 - DNA, 223 bp, Protomyxzoa rheumatica
aatgcggaaatctcctgtcttctgcgtggctcatgctgggagctgtagaccagagctcttcgtatttggccatcttggctcagcaccgcttctgtgtagtttctatgtgaaggtatttccttttccacaataggccccaaagtgctctaaatatccaattgaagattctaaaaaaagagtgtttcaaaacttctcaatcaacagaaaagttcaactctgtgag

SEQ ID NO: 6034 - DNA, 214 bp, Protomyxzoa rheumatica
aagaaaggttaaactcggtgtgttgaacgcacacatcacaacgcaggttctgggaatgattctgtccattttttatacgaagatatttccttttctaccattggcctcaaagcgcttgaaatctacaattgccaattgcacaaaaagagtatttcaaaactgccctgtcaaaatgaatgttcaactctgtgagttgaatacacacaacacaaag

SEQ ID NO: 6035 - DNA, 157 bp, Protomyxzoa rheumatica
attatacgcacatgccaccacgcccaactaatttttgtatttttagtagagatggggttccaccatctttgccggctggtctagaattcctgaactgaggtgatccgcccaccttggctactcaaagtcctgggattacaggcatgaaccattgcac

SEQ ID NO: 6036 - DNA, 136 bp, Protomyxzoa rheumatica
tgtgtgttcaactaacggagttaaacctgttctttatggagcagtttggaaacactgtttttgtaaaatcttcaatgggatatttggaagagtagttaggatggtggtgaaaaaagaaatatcttcgaatataaac

SEQ ID NO: 6037 - DNA, 136 bp, Protomyxzoa rheumatica
gagattgcaccactgcactccagcctgggcgatagagtgagattctcccaaaaataaaaataaaaaagaggcaatgaccttgcttcctgcctctgcctgaggttaggggtccctgacctctgctggcacctagcag

SEQ ID NO: 6038 - DNA, 175 bp, Protomyxzoa rheumatica
cattaaatggtgattccattcaagtccattcgttgattccattcaattccatttgatgatgattccatgcgatgtcattcaatgattctatttgattgcattcaataatgattccattcgagtccattccatgattccattctagtccatttgatgattccatttgattccattc

SEQ ID NO: 6039 - DNA, 127 bp, Protomyxzoa rheumatica
accttgttgttctaacataggtgaccacatttttttcagttttgtattagtgtatttttaatgccaaagctcagtccttagaaagacttataatttaattttcttctgatcataacaaacttggtca

SEQ ID NO: 6040 - DNA, 124 bp, Protomyxzoa rheumatica
aaaacatcacaaagaagtttctgagaaagcttctgtgtgatttttatgtgaagatatttccttttcaaccctaggcctcaaagtattaaaatgttcacctgcagattctacaaaatgagtgttt

SEQ ID NO: 6041 - DNA, 156 bp, Protomyxzoa rheumatica
atatcttcccataaatctacacagaaacattctgagaatctgtttgtgatgagtgcattcaactcgcagaggtggagccctttgtggcagatgttggaaaaggaaatgtcttcccataagaactacacagaatcattctgagaaaattctttgtga

SEQ ID NO: 6042 - DNA, 151 bp, Protomyxzoa rheumatica
cacaggggcttccagaacactgctgctagggtctgaatgttggaacctgacttaggactccagaacactcctgctgtggtctcaatgtttatcccacacacaggattccagaacactgctacgaggttctcaatggttgtccctaacacag

SEQ ID NO: 6043 - DNA, 241 bp, Protomyxzoa rheumatica
gggatggaatggaatggagtggagtggagtggaatggaataggatggaacagaatggagtgcattgcagtggagtggagaggagtggaatggaatggaacagagtggagtggactggagtggagtagaatggaatggaatagaatggaatggaatagaatggaatggactcgtgaaatgaaatatgagctgaaattgtgccactgcactccagcctgggtaacagagtgagattctctcaa

SEQ ID NO: 6044 - DNA, 173 bp, Protomyxzoa rheumatica
tagatgattccatttgattccatttgatgatgattccattatattccatttgatgttgattccgttcgagtccattcgatgattcctttcaattccgttttctgatgattactttcaaatccattcgataattccactctattacatgcgacgactcctttcgattctacttg

SEQ ID NO: 6045 - DNA, 200 bp, Protomyxzoa rheumatica
agatgaatccacacatcaaaaaacattttcaccaatagcatctttctaggtttttccccttagggctcaattgtctacaaaacgtccctttgctgattgtctagaaagagtgtttccaccctgctaattaaaagaagctttaactctgtgagataaatccacacatacaaagcggtgtcacaaaacgcatctttctagtt

SEQ ID NO: 6046 - DNA, 169 bp, Protomyxzoa rheumatica
ttaaatttttagactcctttatactgttctgttatttccactgagcacagtactaagtaataattggtaaatcacagcagaagtcatattactttttctaatacagagtccttggctgttttctaagctaaacctgatcacctacattgagaaaaataaaaagccccag

SEQ ID NO: 6047 - DNA, 134 bp, Protomyxzoa rheumatica
cacatttcaattcaccattccattccactgcattccacttcactccactaaactccactctgttcaattactttccttcccattccattccactccactccatgccactaaactgcactccactccattggatt

SEQ ID NO: 6048 - DNA, 172 bp, Protomyxzoa rheumatica
gagcgctttgacgcctttggtgaaaaaggaaatatcttccataaaaactagacagaagcattccaagaatcttccttgcgatatatgtactcaactaccagagttgaacctttctattgatagatcagttttgaaaagctctttttgtggaatctgcaattggatataagga

SEQ ID NO: 6049 - DNA, 193 bp, Protomyxzoa rheumatica
gaaaaggtatgatcaacactgtgagttgaatgcaaacgtcactaagtagtttctgagaatgcttatttcaggtttttatgtgaagatgtatccttttcctccttaggtctcaaagctctcaaaatgtccacttccagattctataaaaagagtgtttcagatctgctctaatgaaagaaaggttcaattctgt

SEQ ID NO: 6050 - DNA, 186 bp, Protomyxzoa rheumatica
tagttaaacctttcttttgatacagcaggctgaaaagtctttttggagaatcttcaaagggacattttgagcccattgttaccttcgggggaaaaaaaaacagaaaaaaaaaaacaagctatgtctgaaacaaatacgtgatgtatggactcatcttacagaattaaaccttcttttgtttcagca

SEQ ID NO: 6051 - DNA, 161 bp, Protomyxzoa rheumatica
aggatagggtgagggacatggggaaattattgatcaagtatttaagaaatgacctgggtggaagctacaacaaagggtatgagatttagctcatcagtcctcaaatttttggtttcaggaacacttcacatttttaaaagttattgaggaccccaaagagc

SEQ ID NO: 6052 - DNA, 154 bp, Protomyxzoa rheumatica
agcttccctatcttagtgcacctgaagggaaaggaatgtgcttattaaggcccactattttattgggtctgttgtatgagggtgaagtttggcagttaaactttacccaagagactttccccccacctccctctgtgcctgagctgtcttatta

SEQ ID NO: 6053 - DNA, 143 bp, Protomyxzoa rheumatica
ctgcccacctcggcctcccaaaattctgggattacacgcatgagacagtgtgcctggccaagcatcataaatctttatgttcactttaaacctgctcacagcctggttcatctgggctcgctgttttgggcgtggaggataac

SEQ ID NO: 6054 - DNA, 155 bp, Protomyxzoa rheumatica
attcattcatacaatatttattgagcatctactatatgtactgttctaggtgctggggaaaaccagtgaacaaaatagaaaaattccctgttctcacagaatgtacatcctagtgagtggaagggccgtcagtagacaatatacatgaatgactt

SEQ ID NO: 6055 - DNA, 168 bp, Protomyxzoa rheumatica
ggaagatatttcctttttcaccataggcctcaatgcgctctaaatgtctactcccagatacaacaaaaagagtgtttcaaacctcctctgtgaaagggaatctttaacactgtgactagaatgcaaatatcacaaagatgtttctcagaatgcttctgtctagatttt

SEQ ID NO: 6056 - DNA, 193 bp, Protomyxzoa rheumatica
agctgtgtgatcagtgcagtgacacgtcacaatgtccctgtagccatagccttgacaaaagtgactttatctgggtgatcagtttggagatatgtcacaatatccccagtaggctgagactagaaaagagttacataacctgggtaatcagggcagagaaatgtcacagtgccccctgtaagcagatcccaga

SEQ ID NO: 6057 - DNA, 172 bp, Protomyxzoa rheumatica
gagatctcatgaagttttggcacagtctggaaccctagctctttttgtaatgagttatctggcatgacgtccagtcaggagggcccttcatttctgggctcaaggaaaagaaaaaggtcaacttgttttttgtgattgtctgttgtttttcagtaactaacatataggaata

SEQ ID NO: 6058 - DNA, 199 bp, Protomyxzoa rheumatica
ttggaaaagttcttctgaataataacctaaggagtgttttccaacttggttccaatctctccatcacatttaggtacaccaagcaaatgtagatttggtcttttcacattgttccatttttcatggaggctttgtttgtttctttccaatctttttactctaaacttaccttctcactgtattttattaatttgatctt

SEQ ID NO: 6059 - DNA, 183 bp, Protomyxzoa rheumatica
gaacaatcctgctgtggtctgaatatttctccctcacatatgattccaaaacattccttctctagtgtgaatgtttgtccctcaaaaagtattccagaacactgcaactcgggtgtgaatatttgttcctcacataggattccagtacactgctatgagggtcttaattattctccctcacat

SEQ ID NO: 6060 - DNA, 196 bp, Protomyxzoa rheumatica
gagagagagagagacagagaggggagagagacaaagatggggagagagaggggagagagagagtggggagaggggggggagacagagagagagtgggagagagagagagaggggctgaatgttgagttgatcactaaggccaacaatatcattaaccatgcctacataagaaagcctccataaaaacccacaagga

SEQ ID NO: 6061 - DNA, 257 bp, Protomyxzoa rheumatica
agtttgtccctcacataggatttctgaacactgctatgaatggtctgaatgtttgtcccacacaaaggagtccagaacactccagcggtgttctgaatgtattttcctcacataggattccagaacaatgctatgagggtttgcatgcttgccccacacgtaggattccagaacatcccagctgtggtctgaatgattgtcctcacataggattccagaacactcctgctgtggtgtgggggtttgcgccacacatg

SEQ ID NO: 6062 - DNA, 152 bp, Protomyxzoa rheumatica
ccacttgcagattttacaaaaggagagtttcaaaactcctcaatcaaaagaaaggtttaactctcttagacaaaagcacacgtcacaaggacgtttgtcaggttgattctgtctagattttatgtgaagatatttccttttctaccacaggc

SEQ ID NO: 6063 - DNA, 122 bp, Protomyxzoa rheumatica
tcatcattgaatgtacactaatggaatcatcattgaatggaatcgataggaatcttcaaatggtctcaaatggaatcaacattgaatggaattgaatggaataatcgaatagaaacatcatc

SEQ ID NO: 6064 - DNA, 134 bp, Protomyxzoa rheumatica
atagcttctgtctaacttttatctggtgatattcagtttttacccatgggcttcaatgagatccaatatgtcccttggcagactttccaaacagagtgtttccaacctgctgaatcaaaagaaatgtttaattc

SEQ ID NO: 6065 - DNA, 124 bp, Protomyxzoa rheumatica
acagagatctccaaatatccacttgcagattctacaagaagagagactaaaaacttctcagtcacaagatagtttaaactatgtgatttgaaagcacacatgacaaagaagtttctcagaatgc

SEQ ID NO: 6066 - DNA, 165 bp, Protomyxzoa rheumatica
agaaacatattccagattcctatttctgcatgtaagaagattggaagtaatcaataattactttacaataattaatttttataacaagcttaacaacaaattaatatgacacaattaatcttaacaagaaataaaaagctgaagagactaaaaaatcaataattc

SEQ ID NO: 6067 - DNA, 177 bp, Protomyxzoa rheumatica
acttctgtctagattttacgtgaaaatgtttccctttctaccacaggccgcaaaacgctccaaatgtccactttcagattctataaaaacagactttcaaaactgctcaatcaaaagaaagctttgaatctgtgagatgaaaacacacatcaaaaagtagtttctcatattgcttct

SEQ ID NO: 6068 - DNA, 258 bp, Protomyxzoa rheumatica
ctacaggccaaaatccctgatgaacatagatataaaaatcatcaacagaatactagcaaattaaatccaacagcacatcaaaaagattattaaccttgacaaagtgggattcatcccagggatgcaggaatggttcaacatatacaaattaataagcatgatacatcacattaaagaatgaaggacaaaaacaatatgattataccaatacatgtagaaacatcccttcattattaaaaactctcaacaaattaggtg

SEQ ID NO: 6069 - DNA, 132 bp, Protomyxzoa rheumatica
tctattccattctactccattccattccaatcccctccactcagttcaattccaatgcacgccattccattccactccactccattccactttaccacattccattcaattccattagatgccatgcgattc

SEQ ID NO: 6070 - DNA, 173 bp, Protomyxzoa rheumatica
ctctgcactgatcccgaggtgatccaactctttcctggtgtctgcctactggggatattgtgaaatgtctctgcactgatctcccaggtgctgtaaccttagtctaggctccagctacacggcattgtgacatatcactgcactgatcacccacgtgatataactcttgtcta

SEQ ID NO: 6071 - DNA, 160 bp, Protomyxzoa rheumatica
tcatcatcgaatggaatcaaatcgaatcattattgaatggaatcaaatggaatcatcattgacaggaatcaaatggaataatcaacgaatggaatcgaatggaatcgttgaatgcaatccagtgtaatcatcatcgaattgaacacaaagttatcattac

SEQ ID NO: 6072 - DNA, 144 bp, Protomyxzoa rheumatica
ttcctttttcaccataggtttcaaaaggctcacaaatatcccatttgcagattctaaagaaagactgtttccacactactcaatgaaaacaaagtttcaattctgtgagatgaatgtacacatcacaatgctgtttctcagaaa

SEQ ID NO: 6073 - DNA, 187 bp, Protomyxzoa rheumatica
aaagcagatttccaatttttagaagaaaacagaggacatattttatgacactaagcagagagaaaaattttatatgacacaaaacacagacaccgtaaaataaattactgataaattcattcagttgtattaaatgtagaagctttgatctgacaaaagatgtgatgaataaagttaaaagacaaag

SEQ ID NO: 6074 - DNA, 353 bp, Protomyxzoa rheumatica
gtatctggaagtggacatttggagcgctttgacgcctttgctgaaaaaggaaatatcttctcttcaaaactagacagaagcattcccagaaacttctttgtgatgtgtgccctcaactaacagagttcaacctctcttatgatacagaagtttggaaacactctttttgtagtatatgcaaggggatatttggatagctcgaagtatttcgttggaaacgggaatatcttcatataaaatctagacagaagcattctcataaacttctttgtgatatctgcattcaagtcacagagttgaatattccctttctcagagtacgtttgaaaccctctttttgtagtatctggaag

SEQ ID NO: 6075 - DNA, 125 bp, Protomyxzoa rheumatica
tcttcaaataaaaactacacagaagcattctgagaaacttgattgtgatgtgtgcattcatctggcagggttgaacctttcttttgattgggaagttttgaaacactctttttgcagaatctgca

SEQ ID NO: 6076 - DNA, 154 bp, Protomyxzoa rheumatica
caggcagattctacaaaagaagtggttcaatactgctctatcaaaagacctattcaactcagttactttaatacacacatctctatgaagttcctgagaaagcttctgtctaggtttatgtgaaaatatttccttttccatcatgggcctcaaa

SEQ ID NO: 6077 - DNA, 286 bp, Protomyxzoa rheumatica
agtcaaaataaggctttaactctgtgagatgaatgcacacaacaaaaagaggtttctcttatggcttctgtctagattttatgtaaagatacttagttttctaaagtaggtggcaaagcgatccaaatgtccacttgcagattctacaaaaagagcgtttcaaaactgctcaatcagaggaaagttttaactgtgtgagatgaatgcacacatcacaacgaagtttctcagattgctactgtgtagattttatgttaagatatttccttttctcacagagaccgca

SEQ ID NO: 6078 - DNA, 162 bp, Protomyxzoa rheumatica
ttgtgatgtgtgcattcaactcacagagttgagccttcctgttgagagagcaattttgaaacagtcttttggtagtatctgcaagtgaatatttggagcgatttgaggcctgcaatggataaggaaatatctccacataaaaactagatggaagcattctca

SEQ ID NO: 6079 - DNA, 156 bp, Protomyxzoa rheumatica
atcttcacttaaaaactaaacagaaacattctgagaaacttctttatgatgtatgcattcatctcacagaattgaactcttcttttgattgagcagtttggaaacacgctttttctagaatctgtaagtggatatttggagctccttgaggcctat

SEQ ID NO: 6080 - DNA, 139 bp, Protomyxzoa rheumatica
ctacaaaaagagtgtttccaacctgctaaatcaaaataaagttttaacttgctgagatgaatccagacattgcaaagcagtatcacagatagatcatttccagtttttatctgggatatccaattttacccctaggcct

SEQ ID NO: 6081 - DNA, 164 bp, Protomyxzoa rheumatica
tcaagtctgtgagttgaatgcaaacatcacaagcaagtttctgagaatacttctgtctggtttttatgtgatgatatttccttttccaccatagtcctcaaagcactacaaatgttctcttgcagattgtaaaaaaagtgtgtttcaaaactgctctatcaaaa

SEQ ID NO: 6082 - DNA, 135 bp, Protomyxzoa rheumatica
ggaatcctatgtgagggacaaacgctcagaaccccccagcagtgttgtggaatcctgtgtgagggacaaacattgagatcacaggaggtgtgtcctggaatcctttgtgagattcagaccacagcagcagtgttc

SEQ ID NO: 6083 - DNA, 126 bp, Protomyxzoa rheumatica
acaatgaccccataggcagatccaacagaagatttacatcacctgggtggtcagtgtacagatatgtcacaattaccccataggctgagcctagacaaaagtcccatcacctgggtgatcagtgca

SEQ ID NO: 6084 - DNA, 124 bp, Protomyxzoa rheumatica
taaagcagaattaacaccactttttctcaaactttttcaaaacattgaagacaaggtaattttttctaacttattctatgagtacagtattaccctgacaccaagccagacaaaggcaccataa

SEQ ID NO: 6085 - DNA, 221 bp, Protomyxzoa rheumatica
agctatctgtgaaactgctttgtggtatgtgggtgcatcccacagagttaagcctctcttttgattcagcaagttagaaaaactctttgtggagaatctgggcagggacatttgggagtcaattgaggcctatggggaaaaactaaatatctacagagaaaaactagaaagaagttatctgtgaaacagctttgtgatgtgtggattcatctcacagaggt

SEQ ID NO: 6086 - DNA, 138 bp, Protomyxzoa rheumatica
aaagtttaactctgtgagatgaatccacacatcagaaaagagttttgcatatagcttccttctggtttttatttggggatattctgatttaccaactggaatcaatgagctccaaaatatcactttgcaaattctcca

SEQ ID NO: 6087 - DNA, 124 bp, Protomyxzoa rheumatica
atggcttctggctcagtgggatcaggggtcaactaatttcaaccaagactcattccgtcccttcatttcctgggccagctctgcttttcagagaggctattttgagagagcagcaaaaatggcc

SEQ ID NO: 6088 - DNA, 166 bp, Protomyxzoa rheumatica
gcctctcagctgcctccatggagtgctttgcagcggaatgcagacctcaagctctctttgccgtcctcctggctagacctgcgctcattgcgcaccccagctgacgtgcaagggagcccgctggcctctctgtgtgcttgtccatccgtgtaattccagctgaggc

SEQ ID NO: 6089 - DNA, 142 bp, Protomyxzoa rheumatica
tatgttgtattaagctattattgcgttgctatttcaaaaatctgagtctgggtaatgtataagaaaagggtttgattggctcatggttatgcaggctgtacaggaaacatagcaccagcgtcggcctctgggaaggcctcgg

SEQ ID NO: 6090 - DNA, 124 bp, Protomyxzoa rheumatica
tgagaacagcaaagaggaaactgccctgatgatccaattacttccacttggtcccacccttgacacatgaggattattacaatttatggtgagaattgtgtggggacacagagccaaaccatat

SEQ ID NO: 6091 - DNA, 308 bp, Protomyxzoa rheumatica
ttccatttcattccattgcactccgatcttcacataaaatctagacagaagatttctgagaaacttttttgtgatatttgcattcacctcacagagtttaaccattcttttgattgagcagtttggtaaaagtcttgttgtagaatctacaaaaggatatttgtgagcactttgaagcctgaggtgaaaaagtaaatatcttcacagcaaaactagaaagatggtgtctgagaaagtgctctgtgatgtttgaattcatctcacagacttgaacctttctattgatttagcgtattggaaacagtctt

SEQ ID NO: 6092 - DNA, 128 bp, Protomyxzoa rheumatica
gatatttggatagctttgaggatttcattggaaacgggattatcttcatataaaaagtagacgtaagccttctgagaaacgtctttgtgatgtttccattcaagtctcagagttgaacattccctttc

SEQ ID NO: 6093 - DNA, 136 bp, Protomyxzoa rheumatica
aaactacacagatgcattctgagaaatttctttttgatgtgtgcattcatctcacagggttgaacctgtcttatgattgaaaggttttgaaacactgtttttgcagagcctgcatgtggaaattttgagcgctttg

SEQ ID NO: 6094 - DNA, 167 bp, Protomyxzoa rheumatica
aaaaaagaaaaaaaaaacaaaaaaccaatgaagaatcagtaaatactgcaataggcaggcttcaaatagcttaccatcttctatcgatcatagagaaataatccttctctctgggatgtatagttttgaaatagtctagaagaaaaacacaataggtttaagaataa

SEQ ID NO: 6095 - DNA, 128 bp, Protomyxzoa rheumatica
tgtaggcaaagcctaggcaagagttacatcacctttctcattagttcagggatatgtgaaatctcccctgtaggaagagcctagagaagagttacattgcctagctcatcagtgcactgatatttcac

SEQ ID NO: 6096 - DNA, 148 bp, Protomyxzoa rheumatica
gagtttctgataatgcttctgtctagtttttacgtgatgatatttccttttccatcattggactcaaatcgctccaaatttccactttcagatcctacaaaaggattgtttcgaaactgctctataaaaactaattttcaactctgtg

SEQ ID NO: 6097 - DNA, 131 bp, Protomyxzoa rheumatica
tgtttacattcaactcacagcgttgaacgttcactttcatagagcagttttgaaacactcttttcctagaatctgcaagtagacatttggtgcgacttgagaccttgtttgaaaaaggaaatatcttcaca

SEQ ID NO: 6098 - DNA, 172 bp, Protomyxzoa rheumatica
ggaatcccctgtgaggaacaaacattcagaccctcgtatcagggttctggaatcctatttgacagagaaacatatagaccccagcaacagagttctggggtccaatgtgagaaaaaaacaatcagaccctcgtagcagtgttctggaatcctatgtgggagacaaacattca

SEQ ID NO: 6099 - DNA, 126 bp, Protomyxzoa rheumatica
ccaggtgatgtaactctttcctaatctctgcctacagaggacattgtgacatcactctgcacggatcacgcgggttatttaactctagtctagtctctgcctacgggggcattgtgacttatctct

SEQ ID NO: 6100 - DNA, 146 bp, Protomyxzoa rheumatica
ttttgaaacagtctttttgaattatctacaagtggctatttgtactgatttgaggcctaagatggaaaacgaaataccttcatatacaaacaagaccgaagcattctcagaaactggtttgtgatgtgtgcattcagctcacagac

SEQ ID NO: 6101 - DNA, 127 bp, Protomyxzoa rheumatica
taaaattctaaccctgtgagatgaatttacacaacacaagcagtttcacagatagcttttttctggtttttttctggaaatattctgtttctccccttaggcttcaatgggctcccaaatggccttt

SEQ ID NO: 6102 - DNA, 128 bp, Protomyxzoa rheumatica
ccccataggccttaatgggtgccaaaacgtccctttgcagattctccagaaagaatgtttccaacttgctgaatgaaaggaaaggtttaactccgtgagaagtttccacacatcacaaagtagtttca

SEQ ID NO: 6103 - DNA, 286 bp, Protomyxzoa rheumatica
actgtaagctcgcttcaagctagcccacccccttttgtgaagtgtgtataaaagtcaggtgttgtctgtgttccgggcccggtctttttgacgtgagtcagctggtcctgagtgcactcaataaagattctcctgtttcaacctgaggtctgtctcgtcctcctgaatcccgcaacaggagaattccagtatgcaccatgttcagggaacagtgcgcgtcactgaaggaaaagtggggcgggagggggtggtgcatggctgtgagagcctcttgggcttgctggga

SEQ ID NO: 6104 - DNA, 228 bp, Protomyxzoa rheumatica
gattccattcgattccattcgatgattcaattcgattccattcaatggtgattctattagggtccattcaatgattccatttgattccattcgagtacattcaatgattccattcaagtctattcgaagattactttcaatcgtcgaatggcattcaatggaatcatcatcaaatggaatctaatggaatcatcgaatggactcgaacggaatcatcattgaatggaa

SEQ ID NO: 6105 - DNA, 163 bp, Protomyxzoa rheumatica
tatctgagaaatgtctttgcgatttgtgcattcatctagcagaattaatccattcttttccttcagccatttggagacactgtttttgcaggatctgcgaaggggtatctgggagtgcattgagacctatggagaaaaaggaaacgtcttcatataaaaacta

SEQ ID NO: 6106 - DNA, 252 bp, Protomyxzoa rheumatica
gggattctgtttttgaaacaaaacactgagccttcaatgaactttcggtctctgtaaaagcactcctgtcttcctggcagctgttggacctcacaatgtggattgtcccctcaccctgcaatgttgatgccctatcgccatggtgacgggattagggatctcctgctcttggtcctaaaggccactgtctgtgctgtgtttttcaaaggtcagcacagagtgaacctttgtggttttattttccctgagttt

SEQ ID NO: 6107 - DNA, 133 bp, Protomyxzoa rheumatica
gaagatattttctttttctctgtaggcctcaagtggttctcaatgccttttgcagattctacataaacactctttccaaactgctgtataaaaagaaaggtttaactcttcaaagtgaatgcacacatcacaa

SEQ ID NO: 6108 - DNA, 150 bp, Protomyxzoa rheumatica
ctttcttttgattcagtggtttggaaacagtatatttgtacattctgtgaatggacatttgggagcttattgaggcctaaggtgaaaacgaaaacatcttctgataaaaactagaaagttgttttttgagaaactgctttgtgacgtgtg

SEQ ID NO: 6109 - DNA, 145 bp, Protomyxzoa rheumatica
ctttcaattccattcctctcaagtccattccttttgagtccgttccattcgattccattccatactattgcttaccattcgattttattccaatcgattccattcctttcaattccattcctctcaagtccattccttttgagtc

SEQ ID NO: 6110 - DNA, 233 bp, Protomyxzoa rheumatica
aattttcttaatcttttgctcttttcatggataagaaattaatgttatttatttgtcttatgttccttcagaattctcagcctggcaatcaacttctgggaaagagttcagattttttttttttttttagtcttttttttgagacagtgtcttactttgtcacctaggctaaagtgcagttggaccatcacagctcactacagcctcgatctcctgggctcaagcaatcctcc

SEQ ID NO: 6111 - DNA, 142 bp, Protomyxzoa rheumatica
ccaggtgatgtaactcttttctagtctctgcctacagaggacgttgtgaaatcactctacacagatcacccggtttatgttactctcctctgggctctgccaacgggggcattgtgacttatctctgcactgatcacccagg

SEQ ID NO: 6112 - DNA, 128 bp, Protomyxzoa rheumatica
actccactccattccattcccttccactccactcaaatccattcgattcctttcagttcaactccattccactccattccactacacttcactgcgatcaacttcgttccattccattccactcctct

SEQ ID NO: 6113 - DNA, 132 bp, Protomyxzoa rheumatica
tggtggaaaaggactatcttcacttaaaaactagacagaagcattatgacaaacttctttttgatacgtgcattcatatcacagagttgaactttcttttaattgagaagttttcaaacactccttgtgtag

SEQ ID NO: 6114 - DNA, 143 bp, Protomyxzoa rheumatica
ttttgtagtatttgcatatggatatttggacagttttgaggatttcgttggaaacgggaaaatcttcctatgaaatagagacacaggcattctcagagacatctttgggatgttagcattcgagtcacagagttgaacattcc

SEQ ID NO: 6115 - DNA, 204 bp, Protomyxzoa rheumatica
cacacagcagtgttctggaatcatacatgagggacaaacactcagaagccagcagcggtgttctggaatcctatttgagcggcaaacattcagaacagagcaagagtgtcttggaatcctatgtgaggtacaatcattcagagcctcgtagcagtgttctggaatcgtactagagggacaaacactgagaacccaacagcagtg

SEQ ID NO: 6116 - DNA, 147 bp, Protomyxzoa rheumatica
ggagtcctatgtgagggacaaacactcagaaccctgcagcagtgttctgaaaccctatgtgagagataaatattccgacgacaggaggatagttttggaatcctatgtgagggacaaacactcagaaaacagcaggagtgttctgga

SEQ ID NO: 6117 - DNA, 177 bp, Protomyxzoa rheumatica
gaatccagaacattactgccttggtctgaattgttgaccagaatcctgctgtggtctgaatgtttctccctcacataggttccaaaacattcctgctgttttctgagtgtttctcccacaaataggattccagaacactgctactgtggtctgaaagtttttccctcacataggatt

SEQ ID NO: 6118 - DNA, 124 bp, Protomyxzoa rheumatica
cttctgtgtagtttttatgtgaagatatttctttttctaccatagacagcaaagagctcaaaatgtccacttccagattatacaaaaagagtgtttcttaactgctcaatcaaaagaaaggttc

SEQ ID NO: 6119 - DNA, 143 bp, Protomyxzoa rheumatica
atatttccttttttaccataggcctcacatagctcagaaatatctctttgcagtttctacaaaaagactgtttccaaactcatcaatcaaaagaaaggttcaactctctgagatgaatgcactcattataaggaagtttctca

SEQ ID NO: 6120 - DNA, 134 bp, Protomyxzoa rheumatica
ttccattccattgaattcctgtccattccattcgaatccattcaattccagttcattagagtccataccattccatgctattccatttgagtccattccgttccattccgttcgagtaaattcgattccattcc

SEQ ID NO: 6121 - DNA, 158 bp, Protomyxzoa rheumatica
cattccattccattccattccattccattccattccatttctttcaattccacttcactgcaatccattcccttcttttgacaggatctcactctgtgacacaagctggagtgcagtagcacaatctcatctcacatttcatttcaccattccatccc

SEQ ID NO: 6122 - DNA, 140 bp, Protomyxzoa rheumatica
actgctgctgtgttctgagtgtttttccctgacataggattctagaatactgctgctgtgtctgaaggtttgttcctcacacaggactccagaaaaatcctgctctggactgaatgtttgtccctcatattggattccag

SEQ ID NO: 6123 - DNA, 137 bp, Protomyxzoa rheumatica
aattatttttcctttttaaggttaaataatattccattttgtggatatgccacattttgtttatccattcatctgtcaacagacacttgggttgcttccatcttttgactattgtgaataatgctgttgtggacatg

SEQ ID NO: 6124 - DNA, 132 bp, Protomyxzoa rheumatica
agaatctccaaagtgatatttcagagagcattgaagcctattgtgaaaaagaaaacaacttctgttaaaaactggaaagaagctttttgagaatctgccttgagatgtgttcattcatctcacagtgttaaa

SEQ ID NO: 6125 - DNA, 146 bp, Protomyxzoa rheumatica
gaatggaatacaatggaatggaatggaatggtgaaatataacgtgagctaagactgtgccactgcactacagtcttgttgacagagttacatccaattgaaataaaggaatggaatggagtagagtggaatggaatggattggagt

SEQ ID NO: 6126 - DNA, 186 bp, Protomyxzoa rheumatica
actattttctaaaataacttatacagtccaaaagtaaaagggtgctgtttggtatttgtaactctccagcatatattctaatcaattttaacatctgttgaaatctaccaattggcataccttcacaaacttaatcaatactggagctcaaactttgttatacctgagatttcactaaatttaaac

SEQ ID NO: 6127 - DNA, 150 bp, Protomyxzoa rheumatica
aggctttcttaggtaaacaaagctgctggaaagcttgaactgggtgtagaccaccacagctctaggaggcctgcatgactctgtaggctccacatctgagagcagggcacagacaaacaaaaagacagcagtaaactctgcggaattaaa

SEQ ID NO: 6128 - DNA, 246 bp, Protomyxzoa rheumatica
tgatgtaactcttgcatatactctgtctgtaggggagagatattgtgaaatatctctgcattgatcacccaggtaatgggactgttctctaggctttgcctactgggggcattgtcacatatttctgcactgatcaaacaggtgacggactcttgtcttggatttgcctttgggggcattttgacatatctcttcactgatcacccacgtgatgtaactgtggtctaagctctgcctaaaggggca

SEQ ID NO: 6129 - DNA, 161 bp, Protomyxzoa rheumatica
tctgtctagtttgtatgtgaagatatttcattttccaccacaggcctcaaggagctcaaaatatccacttgcagattccacaaaaagactatttcaaaactggtccatcaaaaggaagtgtcaaatctgggagatgaatgcacatatcacaaagaagtttc

SEQ ID NO: 6130 - DNA, 312 bp, Protomyxzoa rheumatica
tcttttgattgtgtagtttggaaacagtctttttgtaggatctgcaatttgacatttggagcactttgaggcctatggtggtaaaggaaatatcttcacaaaaaactagacagaagaattctgagaaaatattttgtgatgtgtgcattcatcacacagagttgaactttcttttcattgagcagtttggaaacactctttgtggaatctgcaagtgagaagttggaatgctttgaggcctacagtagaaatgaaatatcttcagataaaatctagacagaagcaatctcagaaacttatttgtgatgtgtg

SEQ ID NO: 6131 - DNA, 130 bp, Protomyxzoa rheumatica
gcttgatctcaggaggtggaggttgcagtgagctgatatcgtgccactgcactccagcctggggcagagcgagactctatctaaaaaaaaaaattatatgtgaattttcatctgtgttgggggttggtgt

SEQ ID NO: 6132 - DNA, 124 bp, Protomyxzoa rheumatica
cagcaggagtgttctggaatcctatgtcaaggagaaaaatacagaccctcgtagccgtgttctgtaatcctatgtgagggacaaacactcatatcccagcagcagtgttctggaatcctatgtg

SEQ ID NO: 6133 - DNA, 175 bp, Protomyxzoa rheumatica
actccgactcaaaaacaaaaacaaaaacaaacaacaaaaaaacacacacacagtgtattttgtgctacgggaagataagcaggataaaataactaaaaaaaaagttttgcgacagtatatagaatatgatcctgtttaaaaaataaagatgtatataaaatagcaaatataaaac

SEQ ID NO: 6134 - DNA, 131 bp, Protomyxzoa rheumatica
tctgtctagttttcttgtgaagatattactgtttccaccgtaggcctcaaatcgctccaaatatcaaactgcagattccacaaaacgagtgtctcaaaactgcactatgaaaacgaaggttcaaatctgtg

SEQ ID NO: 6135 - DNA, 129 bp, Protomyxzoa rheumatica
gaaacttcctttagagagagcagatgtgcaatactcttttttgtgatatttgcacgtggagatttctagcgcttttaggccaaaaacagaaaaggaaatacctttgtacaaaaactatacagaatcttt

SEQ ID NO: 6136 - DNA, 123 bp, Protomyxzoa rheumatica
cggtgattccattcgagtccatttgatgtttctatttgatactattctataatgattccactcgagtccattcgatgattgcttttgagtctatttgaagatttcattggataccagtcgatg

SEQ ID NO: 6137 - DNA, 197 bp, Protomyxzoa rheumatica
cactccactccaatctattccattccattccaatcccttccattctactcctttatttcaacagggtctccatctgtcacacaggctgtagtgcaggtgatgagactattttataggatctgtgtatgggggcattgtgacctatctctgcactgaccacccaggtgatgggacttttgtctaggctctgcctacgg

SEQ ID NO: 6138 - DNA, 149 bp, Protomyxzoa rheumatica
caaaatgcagctatacaccagcaagactgacttcctcttgtggcttatcactagctctgaatacaagaatcttccaaatgctttataaacaatagtagcatcatgggaataagttggcaagttcccagaattactgttttagatgcact

SEQ ID NO: 6139 - DNA, 132 bp, Protomyxzoa rheumatica
cctgaaacaacagatagtactgaatcctacatatgctattttttccatacataactatgattagtttaattaataaattaacagccagacattaacaacaaataataaagagaacaattattacaacatact

SEQ ID NO: 6140 - DNA, 139 bp, Protomyxzoa rheumatica
ggactcgaatgtaatggaatggaatgtactcgaattaaatggaatcgaaaggaatggacttgaaaggtatgtaatggaacggaaacgactcgagtgcaatggaatggactcgaaatgtatgtaatggaatggaaaagac

SEQ ID NO: 6141 - DNA, 274 bp, Protomyxzoa rheumatica
gaagtaaaatgagctatgctccacctcagcctaatgtagagaatgcctgcaggaaagcctgttttcttcctcataaatagggctgtttgaactgggtgacctcgacgatttcacatactcataagtgtcttccagccctgattcttgctctgagactgtgcagaaatgcatccactctctgtaggtccttcaaatcagagggaggcatggccacttcagaggcatcttgggtagatgaagatgagacggagctaaatgttccagagcactggac

SEQ ID NO: 6142 - DNA, 140 bp, Protomyxzoa rheumatica
gtaattcaaacagctttctggtgatgtgagtaatgttgctgtgaacctaggtgtacgtgtattattttctgtctttgctttcctatcttttgctacatacccagatgtgaaattgctggatcgtatggtgaaattacgtg

SEQ ID NO: 6143 - DNA, 175 bp, Protomyxzoa rheumatica
tctacaaatggacattttggagcttattgagtacaatggtgaaaaagcgaatatcccaggataaaatctaggcagacattatctaagaaactattatgtgatgtgtacattcatctcacagagttaaaactttctttactttctacagttttgaaacacgtttttgtagaatctg

SEQ ID NO: 6144 - DNA, 126 bp, Protomyxzoa rheumatica
tgaaacgaatggaatggaatggaatggataggcatggaatacaaaggaatggactggattgtaatagaattgaatggaatggaatggactcaaatgcaatggaatggaatggactcgaaaggagta

SEQ ID NO: 6145 - DNA, 203 bp, Protomyxzoa rheumatica
cgaatggaatagaattgaatagaagcgaaatgaatagaaaggaatagaaaggaatggagtgtaaaggaaagttatcgaatgaaagtaatggaatggaatggactcgaatcaagtggattgcaatggaatggactcgaatggaatggactggagaggaaagaactcaaaagcaatggaaatgaatggaatggaatggaatggaa

SEQ ID NO: 6146 - DNA, 185 bp, Protomyxzoa rheumatica
tatctgtgaaagtgctttgtgatgtgtggattcatctcacagacttaagactttcttttgattcaacagtttggaaatactctttggagaatatgcgaagggacagttaggagcccattgaggtctatgagaaaaaagcaaatatccctggtaaaacctataaagaaattatctgtgaaatggct

SEQ ID NO: 6147 - DNA, 136 bp, Protomyxzoa rheumatica
ttcgattccatttgatgatgattccatgcgatgccattcaatgattctattcgattgcattcaatgatgattccattcgagtaatttcaacgattccattcaaatccattgaatgatttctttcgattccattcga

SEQ ID NO: 6148 - DNA, 364 bp, Protomyxzoa rheumatica
ggcaagagttacatcacctttgtcatcagttcagggatattttgaaacgcccctgtaggcagattctagacaagagttacttcacctagtggatcagtgcagagatatttcacaataccccctgtgggcagatcctagacaagagtagaatcacctgggttatgagtgcagagatatttcccaatggcccctttggggagacggtagacaagatttacatcacctaggtgatcagggcagagatttgtcaaaattccttgcaggcagtgcttataaaagtgttacatcacctacatggtcagtgcagagatatgtcacaaagctcccttaggcagaacttagatgagttatatcacctggctta

SEQ ID NO: 6149 - DNA, 124 bp, Protomyxzoa rheumatica
taaaacctagactgaagcattctcagaaagttttttgtgatgtttgcattcaactcatacagttgaacctttctcttgaaagaacagttttcaaacactccttttgtagaatctgcttgtggat

SEQ ID NO: 6150 - DNA, 185 bp, Protomyxzoa rheumatica
acactccactccacttcaccccactccactccattccattccattctataagaatccataccactccattccactccactccactccacacgactccactccactccagtccattccattacattccattttaaatctgttccattccattcgtttcttttgacaggatctcactaggtcaccca

SEQ ID NO: 6151 - DNA, 142 bp, Protomyxzoa rheumatica
tcccaaatatagctttgcagactctacagaaacagtgattccaaactcctcaatcaaaagagagttttaactctgggtgatgaatgcacacgtcagaaagtagtttctcacatagcttctgtcaaagtcttctctcaagatg

SEQ ID NO: 6152 - DNA, 229 bp, Protomyxzoa rheumatica
tcaaaactactctatgaaaagaaatgttcagctatgtgaattgaacacacaaatcacaaaggagtttctgagaatgctctccagtttttatgtgaagatatttctttttccaccatagtcaacaaagcgctccaagtgaacacttgcagattctacaaaaagtgtgtctcatcactgctctatcaaagaatgtttcaagtctagcaattgaatgcacacatcacaaaga

SEQ ID NO: 6153 - DNA, 163 bp, Protomyxzoa rheumatica
tttaaaacactgtttttatccattctgcgaatgaacatgtgggagctcattgaggtcagtggcgaaaaagttgaatatctcaggaggtaaacgagaagtaagctatctgagaaactgctacgtgatgtgtgcattcatattgcagagttaaaactttcttttc

SEQ ID NO: 6154 - DNA, 233 bp, Protomyxzoa rheumatica
aaatatcttcacataaaaacaggaaagaaggtttctcagaaactgctttctgatggatgcattcatcttacagtattaaaactttcttttgattgataggtttggaagcacatttttggtagaatctgtgaagggatatttgtgagcacatgtggcctatggtgaaaaaggaaataacttcagattaaaaaaagaaaggagatttctgggaaaccactttgtgatgtgtgcat

SEQ ID NO: 6155 - DNA, 218 bp, Protomyxzoa rheumatica
tggtggaaaaggaaatatcttcacataaaaactatggagaaagattctgacaaacttcgtcataatgggtgcattcatcttatggagttgaaaattagttttgaatgaccaatttgaaacactctttttgtagaatctgcacacagacatttggagcactttgaggcctatggtggaaaatgaaatatcttcacataaaaactagaaagaagcattct

SEQ ID NO: 6156 - DNA, 164 bp, Protomyxzoa rheumatica
agaaaggttcaactctgtgagatgaatgcacacatctcaaagaagtttctcacaatggatctgtcgaggttttctgtgaagatatatcctttttaaccataggccttaaactgttcatgaatatccctctgcagatactacaaaaagactgtttccaaactgct

SEQ ID NO: 6157 - DNA, 187 bp, Protomyxzoa rheumatica
gtgtgattctgacgtacacctctagccagctcctgagtgatttgacttttttgcctgggtgtagcccacagatgagattgtgatatatccttgaatccagcatctaattaatatgcttctaatctcctgtcttggcactgcccataaagggtatcctgacctaacactggtcctggcactttgttat

SEQ ID NO: 6158 - DNA, 87 bp, Protomyxzoa rheumatica
agggtatcctgacctaacactggtcctggcactttgttatatgactgtgtcctgtgctttgcccacatgagccattgtgacatattg

SEQ ID NO: 6159 - DNA, 132 bp, Protomyxzoa rheumatica
aagcgttgcatcacatgagtgatcagtgcagagatatgtcactatgctcccactggcagatccaagacaagagtccatcagctgggtgatcagtgcagaaatatgcctcaataccgccagtaggcagataaa

SEQ ID NO: 6160 - DNA, 157 bp, Protomyxzoa rheumatica
cctgctgaatcaaaggaaaggcttaacgctgtgagatgaatcccctcatcacaaagcagtttcacagatagctttttttctagtttttatttaagtatgttaggcttttaacctaggcgtcagtgggctcctaaatgtcccatcagagattctcaaa

SEQ ID NO: 6161 - DNA, 135 bp, Protomyxzoa rheumatica
gcacatatcacaaagtagtttctgagaatctttctgtcttgtttctatgaagaattcccatttccaacgaaggtctcaaagaggtaaatgtatccacttgcagattctactaaacgagtgtttcaaaagtgctct

SEQ ID NO: 6162 - DNA, 235 bp, Protomyxzoa rheumatica
tttctaccataggcctcaaaacactctaattatccacttggaaattctacaaaaatagtgtttcataactgctctatcgaaaggaaggttcaactctgtgagatgaatgcacacttcacaaataattttctgcgaattcttctttcaagttttatatgaagaaatcccatttccaacaaaaccctcaaagaggtccaaatttgcacttgcagattgtacaaaaagagttttttca

SEQ ID NO: 6163 - DNA, 238 bp, Protomyxzoa rheumatica
cagaacgagtgagtcttgcagggtctggcagtaggaatgacagctctgtgcggaccctctagactacaggtcactgtgtgcaggttacaaaaggggtacaagagggggtctgggcaacttttcaagaattttcatatcacatgggccgtgcagcgttttggtttcaatgtcgagatgttgcaagccaaggctacaaggtggctgagggaccacgccttggtctgtggttggggcttga

SEQ ID NO: 6164 - DNA, 134 bp, Protomyxzoa rheumatica
caacatgaatggacctgggtacattatgctacgcaaaataagccaggcacagaaagacaaacactgtgtgtttgcacttaaatggagaatttaaaaagcctgaacttatagaagcagagtgtacaatggtaatg

SEQ ID NO: 6165 - DNA, 240 bp, Protomyxzoa rheumatica
gaatggaatggaatggtgcaatgaaatgtgaactaagattgtgccactgcactccagtatgggggcagagagagatccagtcaaaataaaggactggactggaatggaggaaaattgaatggaatggactgtgtggaaaggagtggattggaattgaatggagtgtaacggagtggagttcagtggaatggaatggaatggaatggaatggagcagaatggagtggagtggagtggaatg

SEQ ID NO: 6166 - DNA, 127 bp, Protomyxzoa rheumatica
atttagaaggttggaaaatctctttttggagaatctgtgaagcaacattttggagcccattgaggccaatgaggaaataccaaatatccccagataaaaactagaaataaagtatctgtgaaaatta

SEQ ID NO: 6167 - DNA, 130 bp, Protomyxzoa rheumatica
ttcagtccattccattcgagtccattctattccagtccatccctttcaattccattccactcaattccattccactcaattccactctgttacattctattgcattgcattctattccattccattgcat

SEQ ID NO: 6168 - DNA, 145 bp, Protomyxzoa rheumatica
gattgagcagtttggaaacattctttttgtaggatctgccagtggacatttggagcgttttgcaacctatggtacaaaaggaaatatcttcacttaaaatctagacagaaactatctgaaaaacttctttgtgacgtgtgcattc

SEQ ID NO: 6169 - DNA, 123 bp, Protomyxzoa rheumatica
atgcacacatcccaaagaagtttttcagaatgcttctgtgtagttttcatgtgtagatagttccttttccacaatagtcctcaaagtgctccaaatctccacttgtagattctacaaaaagag

SEQ ID NO: 6170 - DNA, 174 bp, Protomyxzoa rheumatica
tgatgaaactcttttctagtctctgcctacagagtgcgttttgatatcactctgcacggatcaccctggttatgtaactcttgtctaggctctgcctaaaggggctttatgacatatctctgcattgatcaaccaggtgatggaacttttgtctaggctctgcctatgggggca

SEQ ID NO: 6171 - DNA, 138 bp, Protomyxzoa rheumatica
tttgacttttatcctttttaacctcggttatatgccagatatttattaattttattagtctttgtcaaagaaccaaattttggctttgttgattctttctcccatttctttgttttcaactacataatattttgttct

SEQ ID NO: 6172 - DNA, 126 bp, Protomyxzoa rheumatica
ttccatttgatgattccattcaattccattcagtgatgattccaatcgattccatccgattttgatttcatttgtttccattcgatgatgattggattcgtgtccattcgatgattccattcgagt

SEQ ID NO: 6173 - DNA, 146 bp, Protomyxzoa rheumatica
cttctttgtgatgtgtgcattcaactgacagaattgaacctctcttttgaaagagcaattttgaagcagtctttgtgtagaatctgaaagtggatatttgtaccgatttgaggcctatggtagaaaaggaaatattttcatataaa

SEQ ID NO: 6174 - DNA, 137 bp, Protomyxzoa rheumatica
tggaaggcaatcgaaaggaatggaattgaatggcaatgaatggaatcaaatggaatgtgatgaactggagtggaatggattgtcatggagtgtaatggaattgggtggaaataaattgaatggaatgtagtggagtg

SEQ ID NO: 6175 - DNA, 229 bp, Protomyxzoa rheumatica
aacggaatggagttgaatagaatggaatggaaaggattggaacggaatggaaatgactgcagtggaatggaatgcagtggaactgagtggagtggaccggagtgcagtggaatggaacttgaatggagcggagtgcagtggaatggggcggaatgtaattgagtggagtggaatggaatgaaatggcatagaatggaatggaatggaacggaatggaatggaatgcaat

SEQ ID NO: 6176 - DNA, 130 bp, Protomyxzoa rheumatica
actggagaaaaaaataaaaaataaatagagtttcaaaactgttcaatcaaaagatacgttcaactctgtgagctgagtgcactcatcacagacaagtttctcggagtgcttctgtgtagtttttatatga

SEQ ID NO: 6177 - DNA, 254 bp, Protomyxzoa rheumatica
ttgattccattctattgaattcaattccattcgaaaccattctattccagttcattccatttgtgtctaatcaattctactccattccattagattccattccattcgagtccattccattcgattgaattccatttgagtcccttccaatggagaccattccattcgagtccattccattacataccattcacgtccattctgatcgaattcattccattcgagtccgttgcatttgtgcacattccattcca

SEQ ID NO: 6178 - DNA, 125 bp, Protomyxzoa rheumatica
attccattcgatgatgatttcattcgattccataggatgatgactccattaggttccatatgatgatgattccactgtgttccattagatgatgattccagtggattccatttggtgatgattcc

SEQ ID NO: 6179 - DNA, 123 bp, Protomyxzoa rheumatica
caaataaaaactacacgaagcattctgagaaacctctttgcgatgtgtgctttcatctcacagatttgagcttatgatagagaagttttgaaacactcactttttagaagctgtaagtggata

SEQ ID NO: 6180 - DNA, 162 bp, Protomyxzoa rheumatica
gaaggcttctgtgtattttttatgtgaagatatttgcttttccaaagtagaccccaaagtgctccaaatatgcacttgcagattcttcaacaagactgttttgaaactgcttcatcaaaagaagtgttcaactccgtctgatgaatgcactcatcacaaaga

SEQ ID NO: 6181 - DNA, 143 bp, Protomyxzoa rheumatica
acatcagctgggtgatcattgcagtgataggtcacaaagtaccctgtaggcagatcctagagaacagttacatcacctggcttatcagtgtagagatatgtcacaatggcactgtaagtagagcctagacaggagttacatga

SEQ ID NO: 6182 - DNA, 127 bp, Protomyxzoa rheumatica
cacaaagcagtttctcagaaagcttctgtctagtttatataggaaaatattttgtttttcaccacagggcttcatgcgaacccaaatattccttcgcacattctatgaacactgtgtttccaaactg

SEQ ID NO: 6183 - DNA, 124 bp, Protomyxzoa rheumatica
cttaaacattgattagaatgtctgttcttcctcaaatcctgatttgttaatacttttgttccccccttaattcaggaaacatttattggacacctattaggagcaagacagtgtgctatgatga

SEQ ID NO: 6184 - DNA, 153 bp, Protomyxzoa rheumatica
tagtccctcacccccaaacaggtcccaatgtgagatgttccccgccctgtgtccatgtgttctcattgttcaactccaacctataagtgagaacatgcggtgtttggtttgaagtccttgtgatagtttgctgagaatgatggtttccatctt

SEQ ID NO: 6185 - DNA, 193 bp, Protomyxzoa rheumatica
agcattctcagaaacttctttttgatgtgtgccttcaactcacagttttgaacccttcttttgatagggcagttttgaaacactccttttgtagaatcttcaagtagatattttgttccctttaagttctacagtaaaaaaggaaatatcttgacatacaaacagacacaaccattctcagaaacttctttgt

SEQ ID NO: 6186 - DNA, 237 bp, Protomyxzoa rheumatica
cacctgcatctgcagagtaccacatgtccctcaccgacctgcataggaaggtgcatgagaaataagttctcttctgaaaattagcgaaaatttcaaaaactatacaaaacaaaaatacgcattcacagtctctggaaatggtcccaagagcatagagcaaataaagttttactcacatgcaggaactcaaggaacttcaaattaaacaaacacaaagagatccacagacacatcata

SEQ ID NO: 6187 - DNA, 190 bp, Protomyxzoa rheumatica
caatcaaaagaaaggttcaaccctgtgagctgaatgcacccatcaccaagaagtgtgtcagaatgcttctgtccggtttttatgtgacgatatttcctttttcatcataggcctcaaagagcactaaatatccgtatgcagattccacaaaaagagtgttcgaaaactgctcagtgaaaagtaaggttcc

SEQ ID NO: 6188 - DNA, 123 bp, Protomyxzoa rheumatica
gaatactgtgtggaatattgtgtggagtactgtgtggaataccatggggaataccatgtggtattattatctggaatgtggtaatattatgtggaataatccacacggtattccacatggtat

SEQ ID NO: 6189 - DNA, 125 bp, Protomyxzoa rheumatica
cctagacaagagttgcatcacctcagagatcagtgcataggtatgtcataaagccttctatatgcaaagcccatacaaggcttacatcagctcggtgatcagtgcagtcatatgtgacaaaaatc

SEQ ID NO: 6190 - DNA, 132 bp, Protomyxzoa rheumatica
tcatataggattccagaagactgctaccggtgtctgatcgtttgtacctcacataggattccagaacattcctgctctgatctgaatgtttctccctcagatacaacaccagaacactgctgctggattctg

SEQ ID NO: 6191 - DNA, 183 bp, Protomyxzoa rheumatica
ttctacaaaaacagtgtttcaaaactgctctagcaaaagaaatgtttaactctctgagttgaatgcaactgttcaatcaaaagacaggttcaatcttaaactgttcaatcaaaagacaggttaaaatctgtgagttaaatgcacacatcagaaactagattctgagaatgcttctttctagtt

SEQ ID NO: 6192 - DNA, 154 bp, Protomyxzoa rheumatica
ttttatatgcagtatatattatgaattctgtgcactttttgatatcttatgtacagcatataatatgtatttggtgtacttttatattctgtgtactgtatatcatatgtattttgtgtactttgatattttatctatggtatataatatgtat

SEQ ID NO: 6193 - DNA, 131 bp, Protomyxzoa rheumatica
tttgtgatgtgtgcattgaactcacagagttgaaacttctttttgatagatcagttttgaaacactcttttttgtagaatttccaagtgtacatttagagcacttggaggcctttggtagaaaaggaaata

SEQ ID NO: 6194 - DNA, 171 bp, Protomyxzoa rheumatica
cagaacactcctgctgtggtctgaatgtttgtcccttacccaggattccagaacactgctgctgtggtctgaatgtttgtctctcacattggattccaaaacattgctgctgtggtctgtatgtttgtccctcacatagaattctagaacactcctgttgtggtctgaatg

SEQ ID NO: 6195 - DNA, 466 bp, Protomyxzoa rheumatica
tagcagttttctggaatcctatgggacaaacatttagaccccagtagcagttttctggaatcctatgtgagggagaaatgctgagaacccagcagcagtgttctggaattccaagtgaggtacaaacattcagaccacagcaggggtgttatggaatcctatgtgaggcagaaacattcagatcacagaaggattgttctggaatcccatattaggcacaaacaccaagaccacagcaggagtgttctggaatcctatgtgagggtcaaccattcagaccacagcagtagtgttctgcaatgttctatgagggacaaacattcagaccacagcaggtgtgctctggaatcctatgtgaggaacaaacattcagaccacagcagcagtgttctggaaccctatgtgagggacaaacactcagaagcccacagcagtcttctggaatcctatctgagggaaaaacatt

SEQ ID NO: 6196 - DNA, 182 bp, Protomyxzoa rheumatica
gtctttttgtagaatctgcaaatgatacttcaagcactttgaggcctatggtgaaaaaggacatatcttcacatgaaatataaacagaagctttctgagaaacttccttttgatgactgcatacatctcacagaggtgaaactttcttttcattgagcagtttggaaacagtctttttgtaa

SEQ ID NO: 6197 - DNA, 182 bp, Protomyxzoa rheumatica
tcacataaaactagacagaagcattttcagaaactacttttagatgtgtgtttcaactcacagagttgaatcttttgatagagcagattggaaacagtctttttgtacaatttgaaagtgtatgtttggaaaactttgaggccttcactgtaaacggcaatatcttcacataaaaaatagac

SEQ ID NO: 6198 - DNA, 189 bp, Protomyxzoa rheumatica
cttattaaattcttgatccctgacggcaccatggagtcaggattggctcatctcaaacctgactcagaaacaaaaccatctcaatgtgcagagatgagcgtccttacctgctatcatattttctggtgttttcacagtgctgcgcttcctaatccccattccaccgcaatccacatgccatgatgacca

SEQ ID NO: 6199 - DNA, 133 bp, Protomyxzoa rheumatica
tcaacaggggtttagaaatttatttttagtttatatatggaaaaaagaaggattttcaatcctgagccatatttctcagtcaatcaatccctgcagggaaccctgttctttactctggagataaacactagtt

SEQ ID NO: 6200 - DNA, 157 bp, Protomyxzoa rheumatica
cagataaatgcaaattaaaactacagtgagatatcatcttatatcagtcagaatggctactagtaaaaatattgaaaacaacagatattggtgagaatgtagaggaaaaggaatgcttatatattgttggtaggaaggtaaattagtacaacttata

SEQ ID NO: 6201 - DNA, 201 bp, Protomyxzoa rheumatica
aaaacattcagaccctcgtagcagtgttctggaatcctatctaagggacaaacattcagacaatcgtaggagtgttctggaatccgatgtgagggacaaacattcagactcttgtatcagtgttctgaaatcctacgtgaaagacaaacattcaaacaatcgcagcagtgttctggaatcctatgtgagggacaaatattc

SEQ ID NO: 6202 - DNA, 151 bp, Protomyxzoa rheumatica
atcatctaatggaatagaattgaatcatcgaatggaattatcagatggaatcaaatggtatcatctttgaatggattcaaatggaatcatcgaaaggaattgaatgcaatcatcttcgaatggaatagtatagactcattgaatggaatcg

SEQ ID NO: 6203 - DNA, 170 bp, Protomyxzoa rheumatica
ggaatcatatggaatcatctaactcaatcgaatggagtcatcattgaatggaatcgaatggaataatcgaatggacacgaatggagtcatcatcaattggaattgaatgcaatcatcaaatggactcgagtggaatcagcgtcaaatgaaattgaatggaatcatcgaat

SEQ ID NO: 6204 - DNA, 186 bp, Protomyxzoa rheumatica
tggaatggaatggactggaatggaatgtaatgtactagaatggaactgaatcaaccagagtagaatggaatggaatggcatggaacggaatggaatggaatgtaatgcaatggaatataatggtatttattcaacccgagtggatcggaatggaatggaatggaatggaatagaatggaattgaat

SEQ ID NO: 6205 - DNA, 160 bp, Protomyxzoa rheumatica
agtttctcagagtgcttctgtgtagtttttatgtgaaggtatttccttttacacagtaggccacaaagggctccaaatattcacttgcagattctccaaaaagagagtttctaaaatcctctaccaatagataggtacaactctgtgagttgaatgcaca

SEQ ID NO: 6206 - DNA, 469 bp, Protomyxzoa rheumatica
ggaatggaatggaatggaatgcaaaggactcgaatagaatgtattcgaatggaattgaatggatttgaaaggcatcgaatggaatggaatggaatggaatggacacaaatacaatggactcgaagggaattgacccaaatagaaaggactcgaaaggaatggcatcgaatggaatttattcgaatagaatggaatccaattgcatgcaatgggatggaatggaatggaatagaaaagaatggacaggaaaggaatggacttgtatggaaaggactagaatgtagtggattgcaaagtaaatggttcaaatggaatggaatctaatggaaagtattcaaatggaattgaattgaatgaatcagatgggaatacaaaggaatgcaggagaatggaacggaggggaattgagtgggatggaattttgtggaatggaatccaatggaatggaatcgaatgaaatggattcgaa

SEQ ID NO: 6207 - DNA, 163 bp, Protomyxzoa rheumatica
gaagatatttccttttctaccattggacacaaatcacttgacatctccaactgcaaattccacaaagagagtgtatcaaatctcctctgtctaagggaaggttgaactctgtgagttgaatacccacaacacaaagaagttcctgagaattcttttgtctaac

SEQ ID NO: 6208 - DNA, 178 bp, Protomyxzoa rheumatica
aggccgagcctagacaagagtcacatctcctgggtgatctgttcaaatatatgtcacaaagccccctgtagacaatcccagaaaattgttacctcacctgggtggtcagtggagatatctgttccatttcccctttaggcgcaccttagacaagcattacatcacatgagtgatcagt

SEQ ID NO: 6209 - DNA, 187 bp, Protomyxzoa rheumatica
ccattccattccattccatcccattccattgcactccattgaactccaaaccactccactacactccaccccattccattccattcctttctttcgacaggatctctctctgtcacccaggctggcgttaagtggcacaaactcagctcacatttcattttaccattccattccattccattgcatt

SEQ ID NO: 6210 - DNA, 334 bp, Protomyxzoa rheumatica
aatgtttgtccctcacataggattccagaacactgctacggggctctgaatatttgtcactcacatagaattccagaacccttctacgattgtctgaatgtttgtccctcacataggattccagaacaccgccacgaatgtctgaagttttgtccctcacttaggattccagaagaatacagctgtggtcggaatgtttgtatctcacatagggttccagaacactgttgctgggttctgagtatttgtacttcacataggattccagaacactgctacgagtgtttgaatgactgtccctcacataggattccagaacacttctacgattgtc

SEQ ID NO: 6211 - DNA, 219 bp, Protomyxzoa rheumatica
tggagccctttctggcctatggtggaaaaggaaatatcttcaaatgaaaactacagaaaagcattttgaggaacttctttgtcatgtgtgcattcatctcacatggttgaacctatattatgattgagcagttttgaaaaactctttttgtttaatttgcaagtggacacatagagccctttgaggcctactgtggaaaagcagatatttccacctaaa

SEQ ID NO: 6212 - DNA, 202 bp, Protomyxzoa rheumatica
atgtttgtccctcacataggattcctgaacactgctatgattgaatgtttgcccccacataggattccagaatactgctacgagggtctgaaagtttgtctctcatataggattccagaacactgctaagattttttgaatgcttgtcactcacgtgggattccagaacactcgcgctggggtctgaatgtttatccctcac

SEQ ID NO: 6213 - DNA, 135 bp, Protomyxzoa rheumatica
gacatttggagtgctttgcagcccatggaggaaaaggaaatgtcttcacataaaaactagatggaagaattctgagaaacttctttgtgatgcgtgcgttcattgcacagagttgaacctttcttttggttgagc

SEQ ID NO: 6214 - DNA, 272 bp, Protomyxzoa rheumatica
gctctggaatcctatgtgagggacaaacattcagaacttcgtagccgtgtgctggaattttatgtgagggagagatatttagacccttggagcagtgttctggaatcccataggagagacatacattcagaccctcccagcagtgttctggaattctatgtgagggacagacattcaaaccccagcagcagtgttctggaatgtgatgtgaggtacaaacattcagacaccagcagaagtgtgctggaatactatgtgagggagaacactca

SEQ ID NO: 6215 - DNA, 122 bp, Protomyxzoa rheumatica
tacagtaagtgatcaagaaacacttgctgaatgtatattaataaagtttttcaaatatttcagtaaaattccaaaagagttagttgcctccccctccaaccaagaaaaattacaaacctgaa

SEQ ID NO: 6216 - DNA, 182 bp, Protomyxzoa rheumatica
gaggcctatggaggaaaagaaatatcttcagaaaaaaactatttagaaacattctgagaaacttctttgtgatgtgtgcattcatttcccagaattcaacatttctttttatggaccaatattgaaataatctttttgttggatctgcaagtggacatttggagcgccttggggcctatggt

SEQ ID NO: 6217 - DNA, 171 bp, Protomyxzoa rheumatica
acatcacaaaggagtttctcagatagtttcctcttagtttttatcctgggacaattcgattttttgccattggcctcaaagagctcccaaatgtccattcagagaatggacaaaaacagtgtttctaaacttttgaattcaaagaaaggtttaaatgtctgagatgaatgc

SEQ ID NO: 6218 - DNA, 126 bp, Protomyxzoa rheumatica
gaagcatcgaatgtactagaatggaatcatcatcgaatggaatcacatggaatcatcgaaagggctctaatcgaatcataaaattgactcgaacggaatcattatagaatggaatcgaatagagta

SEQ ID NO: 6219 - DNA, 169 bp, Protomyxzoa rheumatica
ccatcatcacaattgcagcccaggttcagagttcaattccctgcttaaggaatgagtactttcttgtttgatatctgcatgacttttgttgattttcttccacttcatgaaccatcttgaattttcctttctctgagcatttgtgaggttacctttggtaatgttcaaa

SEQ ID NO: 6220 - DNA, 150 bp, Protomyxzoa rheumatica
agtgattcaaaaatgcagaatcaaaagaaaggtttagctctgtgagatgaaagcacacatcataacgcagcttctcagaaaccttctttctagtttttatctaaagatatttcctttttcaccataagccttaacacgctcccaaatttc

SEQ ID NO: 6221 - DNA, 133 bp, Protomyxzoa rheumatica
ctaatatccacttgcagatcctgcaaaaactgtgtttcataactgcgcaaccaaaagaaagtttcaactctgtgagatgaaagcacacaatgcaaagactcttctcagaatgcttctgtgtagtttttatgtg

SEQ ID NO: 6222 - DNA, 160 bp, Protomyxzoa rheumatica
agtgtttctgaactgctgaataaaaaagaaagttttaaatctgtggataaatgcgcacatcaaaaagcagtttctctgaaagatttttttctagtttttatctgaagatgtttcctttttcaccaaaggcctcatagtgcatccaaatattccttcagag

SEQ ID NO: 6223 - DNA, 600 bp, Protomyxzoa rheumatica
agaagcattctgagaaacttctttgtaatgtgtccatgcatctcacagagttggagaattttcaatttagcagttttgaaatactctttttgtagaatctacaagtggacattttgggagctttgaggcctatggtagaaaaggaaatatcttcacataaaacaagacagaagaattctgagaaacttttttgtaaggtgggcattcatctcacagggttgaacctttcttttgattgagcagttttaaacactctatttgtagaatctgcatttggacatttggagtgctttgcggcctatggtagtgaaagaaataccttcacataaaatctagagagaagcaatctgagaaacttctttttgatttgtgtattcatctcacagtgttaaacctttcctgtgattgaacagtttgaaactctctttttgtagaatctgatagtggacatttggagcactttgaggacaatggtggaaaaggaaatatctttacataaaaactagactgaagatttgtgagaaacttcattgtgatgtgtacgttcatctcacaaaggtgaacctttattttgagtgagcagtttggaaacatggttta

SEQ ID NO: 6224 - DNA, 182 bp, Protomyxzoa rheumatica
cgatcttagagcctggacaagagttacgtcatctcagtgatcaatgtagtgatatgtcactatgccccagaattcacagcctagtcaagcgttacatcacctgggtgatcagtgcagggatatgtcacaagtcccccatatacagagcctagacaagagtcccatcacctgggtgatcagtg

SEQ ID NO: 6225 - DNA, 187 bp, Protomyxzoa rheumatica
atgccattcctttcccttccattccattccattccactctaatccattccattcctttcattcgtcaggatctcactctgtcacccaggatggagggcagtggctcaaactcagctcagatttcgtttcacaattctattccattctattccatttcattcatttccattccattccattccattcc

SEQ ID NO: 6226 - DNA, 212 bp, Protomyxzoa rheumatica
aaagtggtcaaaatacacacttgaaaacttcacaaaagatcgtttcaaaactgctctatcaaagaaatattaaacactataagctgaatgcacacatcacaaattactttcccagaatgattctctctagtttttccaagaagatatttcattttctaccacaggcctcataccgctccaaatttccacttggaaattctgcaaaaagtgta

SEQ ID NO: 6227 - DNA, 154 bp, Protomyxzoa rheumatica
tttggtgatgtttaattaggtgcatatatgtttatacttgtgctttctttctttctgatggattggccattttattattgtaaaatatcccacattatctctaaaaacaaaatttttttttaagacagagtttctctcttgtcacccaggctgg

SEQ ID NO: 6228 - DNA, 155 bp, Protomyxzoa rheumatica
aatggaatggaatggaatggaatggaatagaaaggagtggaatggaacggaatggaatggaaggcaatggaattgactagaatataatgtaatggaatcgacacgtatggaatggattggaagtgaacggactgcactgcaatgcaatggaatgg

SEQ ID NO: 6229 - DNA, 206 bp, Protomyxzoa rheumatica
tcacagagttgaacctttcttttgattgagcagtttggaatctctttttgtagaatcagcaagtggacatttggaggtctttgtggctatggtagaaaaggatatatcgtcacataaaatctagacagaagcaatcggataaacttgttttattattattattatgctttaagttttagggtacatgtgcacaaactgcaggttac

SEQ ID NO: 6230 - DNA, 173 bp, Protomyxzoa rheumatica
ttgattgtgcagttttgaaacactctttttgtggaattttgcaagtgtatatttagagtgctcggcagcctacgttagaaaaggaaatatcttcacctaaaacctagacagaaacattgtcagaaacttctttgtgacatttgcattgaactcacagagttgaacgttcctct

SEQ ID NO: 6231 - DNA, 176 bp, Protomyxzoa rheumatica
gttcgattctagtccattcctttcaagtccattccattcaattttattctattcctttccattcgattccactcctttcgattgcattcctttctagtccatttcactggagaccattccattcaagtccattgcattccataccattcgagtccattccactcttaaccattcca

SEQ ID NO: 6232 - DNA, 127 bp, Protomyxzoa rheumatica
attaagtgccgtttgaggcctattgtagaaaaggcaatatcttcacagaaaaactagacaaaatgattctctgaaaaaactttgtgtgtgtgcatttaactcacaaagtttaacatttcttttgata

SEQ ID NO: 6233 - DNA, 152 bp, Protomyxzoa rheumatica
ccactagagtccatttggtgatgattccgttcgattccagtcgatgatgataccattcgagtccatttattgattccatttgattccattcgatgatgattccattcgtatccatccaatgattccattcgtttctgatcgatgttaattcc

SEQ ID NO: 6234 - DNA, 142 bp, Protomyxzoa rheumatica
cagaaagactctttccagtttttatctgaagataatttctttttcaccatagtcttaattgtgctccaaaatgtcttttcacagaatctataaaaacagtgtttccaaactgctaaatgaaaagaaaggtttatttctgtga

SEQ ID NO: 6235 - DNA, 180 bp, Protomyxzoa rheumatica
tccgaagatgtctttggaaacgggaatatcttcacataaaaactacacagaagaaatctcagaaacttctttgtgatacttgcattcaactcactgagttgaacactccttttcttagagcagtttagaaacactacagatttttgtagaatctgtaagtggaaacttggagcgctttga

SEQ ID NO: 6236 - DNA, 149 bp, Protomyxzoa rheumatica
cctttgtcatcagttcagggatatgtgaaaacgcccctgttggcagcgattagtgaagagttacatcacctttttcatcagatcagggatatttgaaaactccccaataggcagagtctagacaagagttacatcacctgtgtgatcag

SEQ ID NO: 6237 - DNA, 143 bp, Protomyxzoa rheumatica
gctttggaatggaatggaaaataatttaatgaaatttagttgagtggagtggattttattggagtggagtggaatggaatggattagagtttagagcagtggcgtggagtggagtggaatggagtggaatggagtggagtgga

SEQ ID NO: 6238 - DNA, 146 bp, Protomyxzoa rheumatica
tttccagactcatcaaagaatagatacttttatctctctgagatgagggcaaaccttgcaaaacagcttctcagaaacattctttatagtttttattgaagatatttcctttttcaccatcggcctcaaagccctccaaatgtcca

SEQ ID NO: 6239 - DNA, 175 bp, Protomyxzoa rheumatica
ttccaatatcataaagtagtttctgacaatgtttctgtctagtttttatgtgaagatattctttttctaccataggcctcaaagggctgtaaatatacaatttcaaattctaccaaaagagtgtttcaaaactggtctatcaaaagaaaggttaaactctgtaagctgaatgcac

SEQ ID NO: 6240 - DNA, 191 bp, Protomyxzoa rheumatica
ccattctattccattgcattccatgtgatatctttccattatactccattccattatattcctttcaattccattcaaatactttccgtttgaatccattccatttgattccattccattcgacaccattccatttgacaccattccattcgaatccattcctttccattccattccattccattccattc

SEQ ID NO: 6241 - DNA, 135 bp, Protomyxzoa rheumatica
ctggaaagaagcattattagaaacaactttctgatatgtgtgtttatctcatagagttaaatccttctttcatggaacagtgtgtatacactgtttttctggaatctgcagagggatatttgggagtgcattgag

SEQ ID NO: 6242 - DNA, 137 bp, Protomyxzoa rheumatica
catacagattctacaagaggagatattaaaaactgctcagtcgaaagacaggttcaattctgtgatttgaatgcatgcatcacaaagatgtttttcagaatgcttttgtgtaatttttatgtgaagatatacccttt

SEQ ID NO: 6243 - DNA, 164 bp, Protomyxzoa rheumatica
cagagatatgtcacaaatccccctctaggcagcgtatagagaagagtcccatcaccaggatggtcagtgcagagatatatcacaatgccccctgttggcaaagagtggaaaagagttacacaaccttggtgatctgtgcagagctatgtcaaaacgcccctgta

SEQ ID NO: 6244 - DNA, 127 bp, Protomyxzoa rheumatica
tgccactgcactccagcctgggagacagggtgagatcctacagaaagaaaggaatagaacagaatggagtgtaatggaatggaatgaaatgtagtggaatggaatggagtgcaatggaatgggatgg

SEQ ID NO: 6245 - DNA, 131 bp, Protomyxzoa rheumatica
atatttagagagctttgaggcctacggtagaaaaggatatatcttcacaaaaaaatagacagaagcattgtcagaacctactttgagatatttgcattgaactcacagagttcaacattccttttgataga

SEQ ID NO: 6246 - DNA, 149 bp, Protomyxzoa rheumatica
gaagacaattcctttttcaccataggccacagtgcacccccaaatatacttttgcagatactacaaatacgaggtttccaaagagctcaatcaaaagtaagttttaaccctgtgagatgaatgcacacatcacaaagcagtttctcaga

SEQ ID NO: 6247 - DNA, 132 bp, Protomyxzoa rheumatica
gagagacatgggagacaaaagtacatatgatgattactttgctaaattccctgtttattcttccaactggactcataaaagtacggacacggtgggttgcgagatctctgtgtagtcatgactccgcaatta

SEQ ID NO: 6248 - DNA, 202 bp, Protomyxzoa rheumatica
ctgttgaaagaaatgaatggaatgcaacggagaggaatggagtggagtggagcggaatggaaagggaaggagtggaacggaatggagtggagtggggtggagtgaaatagagtggaatggaatagggtagaatggaatgcaatggaatggtgaaaagaaatgtcagctgagactgtgccattgcactccagcctttgtgaca

SEQ ID NO: 6249 - DNA, 176 bp, Protomyxzoa rheumatica
gagatatgtcacaatgccactgtaggcagagcctagacaaaagtcctatcacctgggtgatcgtgtgtgacagatggagaccctgttgaaataaaggagtggaatggaagggattggaatggaatggaatggataggagtggagtgaagtggaattgagtggagtggagtggagtg

SEQ ID NO: 6250 - DNA, 143 bp, Protomyxzoa rheumatica
taacacctaaaggaaagggagatggagggaaaggagggaattcagaggaatgatcagggtaggagctcaatcctgatgatggaccatgcagattccgttgaggtgaggtgtggggttgttactatcaggaaacacactgggtc

SEQ ID NO: 6251 - DNA, 136 bp, Protomyxzoa rheumatica
tagaatctgcaaatggatatttggagcactttgaggactatggtgaaaaaggaaatattttcacagaaacctagaaagcaacattctatgaaacttctttgtgatatgtgctttcgtttcacagagttgaaccttt

SEQ ID NO: 6252 - DNA, 235 bp, Protomyxzoa rheumatica
caaaaatcttataacattaaattttgtgatggtttcttgactgtaacaccaaaagcataggccagaaaataaaaaacagataaattggacttgatttaaatgtgaaacttttctgattttttgatatgaaaaacactctgttgttcgtgttttttgatagaaaaaaaaacccacctcttctaaaatttgatacaaaaagcatgaacaagagagtgaaaagacaaccagcaaatgg

SEQ ID NO: 6253 - DNA, 175 bp, Protomyxzoa rheumatica
tatctaaagtggtaacttgtcgtggttttgatatccatgtccctcataactggtgatgctgagcatttttctgtagacttattgaccaaatgtagattcaagtcctctgcccttttataaatgctgttgttgtttcattttgttgttgagctttaaaagttctttttatatcctg

SEQ ID NO: 6254 - DNA, 277 bp, Protomyxzoa rheumatica
attccattccattccattccattcaatatctttctattacactccattcctttctactccttttgattacattcaattccattccatttgtttccattccattctattccattcctatcgactccattccattcgagttcgttgcattctattcaattcccttacattcaatgccacagcattcaattccattttgttacagtccattctattcgagtccattccattccatatcattcgatgccattccattcgattctattccattcgactccct

SEQ ID NO: 6255 - DNA, 131 bp, Protomyxzoa rheumatica
tccctcacataggattccagaacacagctacgagggtctgaatgtttgtccctcacaaaggattctgtatcactgcaatgagtacccgaatgcttgtcacacacatagcattccagaacactgctactggg

SEQ ID NO: 6256 - DNA, 130 bp, Protomyxzoa rheumatica
ttgattgagcagtttggaaacaccttttttgtagactctgtgaagggaagttaggtagtgcaaaaaggcctatggtgaacaaggaaatatctttgggtaaaaactgcaaagaaattttatgagaaactgc

SEQ ID NO: 6257 - DNA, 125 bp, Protomyxzoa rheumatica
tgcatgagtccttctactttgttctcctttctcaagattgttctggctattctgagtcccttgcaattccagataaattttaggatcagtttgtaaacttctacgtagaagaaatggaaagctga

SEQ ID NO: 6258 - DNA, 147 bp, Protomyxzoa rheumatica
acttggaaattctacaaaaacagtttttaaaaactgctctattgaaaggaaggttcaaatctttgagttcaatgcacacatcacatagaaatttctgagaattcttctctctatttttgtatgaagaaatcatgtttccatagaagg

SEQ ID NO: 6259 - DNA, 190 bp, Protomyxzoa rheumatica
aaagagaatagagagaccaatatgaaatagaggactagagagactagagagaccgatatggagaacaggatgattgtttattttagggtactcactggattcgtggattcatatctaaaaatatgagcactgaacaaagactgagcagggcttttctaagcaaacttacagaagcaaaacaaaagcagtt

SEQ ID NO: 6260 - DNA, 137 bp, Protomyxzoa rheumatica
ggactacaggcatgcaacatcacactcagctgatttttgcattttatgtagagtccacgttttgccatgttgcccaggctggtctagaactcctgggctcaactgatcatcctgccttgacctcacaaagtgctggg

SEQ ID NO: 6261 - DNA, 245 bp, Protomyxzoa rheumatica
attggagtggagtggaatggagtggaatgcaatggaatggaatggtatggaatggaacgggggaggggagtggagtggagtggaattgagtgtagtggcacggaatggaatggaaaggaaaggaatacaatggaatggtgaaatgaaatgtgagctgagattgtgcccctgtattccagccttttttgaaacagtgatatcccgtcgaaaggagggattggaatggaatggggtggaatggaatg

SEQ ID NO: 6262 - DNA, 226 bp, Protomyxzoa rheumatica
ccaaatatgcacttgaagattctacaaaaacagtgttccaaaacttttgaatcataagataggttcaactctgtgagttgaatgcacacattgcaaagaaattcctcagaatgcttctgggtagtttttatttgaagatatttccttttcctccataggccgcaaagggctccatatgaccacttgcaaatcctacaaaaagagggaatcaaaactgctcaatgaa

SEQ ID NO: 6263 - DNA, 137 bp, Protomyxzoa rheumatica
cttgaaactttcttttgtttgagcagttttgaaacactccttttgtataatctgcaagtggatatttggagcgcactgaagcctgttgtagaaaaggaaatatcttcacataaaaactacacagaatcattctgaga

SEQ ID NO: 6264 - DNA, 137 bp, Protomyxzoa rheumatica
agcaagcctgggcaatggggttgccccacccccagcctcactgccaccttgtagtttgatcacagactgctgtgctagcaatcagtgagacactgtggaggtaagaccctccgagccaggtgtgggatataatatcc

SEQ ID NO: 6265 - DNA, 153 bp, Protomyxzoa rheumatica
ccactcgatgatgattccattcgagtccattcagtgattccattgtatttcattccatgataattccgttcaattacattcgatgattccattcgattcctttcaacaatgattctgttcttgtccatttgatgattccattcgattccattt

SEQ ID NO: 6266 - DNA, 143 bp, Protomyxzoa rheumatica
ccttagccctttgagacctatggggaaaaatagaatatccccagaaaaaaatttggaggaaggtatctgacaaacttctttgtgatgtgttgattcatctcacagtgttaaaccttccttttgattccataggttggaaattc

SEQ ID NO: 6267 - DNA, 162 bp, Protomyxzoa rheumatica
tttgaatcctgtgttggaaaaggatatatcttcactgaaaaactcgacagaagaattctcaggaacttgattctgttgtgtgcattcaactcacagagctgaaacttcctgttgagagagctgttttgaaacagtccttttgtagattatgcaagtggatat

SEQ ID NO: 6268 - DNA, 139 bp, Protomyxzoa rheumatica
aaaactgctctctcaaaaggaagtttcaactccgttagttgaaggcttacatcaaaaaaagtttctgaggatgcttctgccaagtatttatttgatgttatctcgtttccaacaaaatcctgaaacagctccaaatatc

SEQ ID NO: 6269 - DNA, 130 bp, Protomyxzoa rheumatica
gcactcaaaacaaagcagtttctgagaatgcttctgtgtagtttctgtgtgaagacatttccttttctacaacaggcctcaaagtgctacaaatatccaattgcagattttacaaaaagagtgttttaaa

SEQ ID NO: 6270 - DNA, 144 bp, Protomyxzoa rheumatica
tgtgttgtgtgcattcaactcacagatgtgaattaatcttttgatgagcagttttgaagctctctttttgtagtatctgcaggtgtatgtttggaaccatttgatgcctatgggggaaacggaaatgccttcacatgaaaacta

SEQ ID NO: 6271 - DNA, 225 bp, Protomyxzoa rheumatica
gaacagaatggcatggaatggaatggaattgactcgaatgaaatggagtcaaacagaatggaatcgaatttaacacaattaaatggaatggaattgaatggattctaaaggaataaaatggaatggagtgtaacggaaagatatcaaatggaaagaaatggaatggaatggactcgaatggaatggaatgtaatggaatggactcgaatggagtggcctggattg

SEQ ID NO: 6272 - DNA, 257 bp, Protomyxzoa rheumatica
agtttcaaaactcctcaatcaaaagaaaggtttaactctcaggggcatgcacaaaacacaaagtagtttctctgattgcttatgtctagattttatgtgaagatagtcccttttctaccataggtggcaaagcacaccaaatgtctacttgcagattctccaaatagagggtttacaaatttctctatcaaaagaaaggtccaactctgtgagatgaacgcacacatcacctagaagttgctcagaatacttgtgtt

SEQ ID NO: 6273 - DNA, 277 bp, Protomyxzoa rheumatica
gtttttatgtaaaggtatttcctatttcaccataggcctcaaagggctcagaaatatccctttgcagattgtatgaaaagactatttctgaactactcaatgaaatgaaagcttcaactctgtggtttgaatgcacacatcacaaagaagtttcccagaatacttctgtctaatttttatatgaagatatttctttttcaccacaggcctcaaaccactcagaaatatccttttacagattgtgcaaaaagactgtttccaaactgctcaatgaaaa

SEQ ID NO: 6274 - DNA, 142 bp, Protomyxzoa rheumatica
tgtcagtatctgaggaggtaggatctgggtgcgggtataaggatctggatctgtcagtgtcttaggaggtaacatcttgccttggtataaggatctgggtctttctatgtaggaggaagtaggatctggtacaggtgtgagg

SEQ ID NO: 6275 - DNA, 217 bp, Protomyxzoa rheumatica
ggaattgaacggaatttaatgaaatggaatggaatggagtggagtagactggagtgtagtggggatttgtggaatgaaattgaatagaatgaaatggaatggaatggaatgcagtggtgtgcagtggaatgaagtggaatggattggagtggaatggagtggagtggaatggaatggaaggaattatagtggaatggaagggaatggaatggaatag

SEQ ID NO: 6276 - DNA, 197 bp, Protomyxzoa rheumatica
attccattcaagtccattcttttcaattccaatacattcacgtccattttatttgagtcggttccattcctgtcaattcaattcgagttgattccattggagtgcattgaattcgagtccattcaattccagaccattccattagattcccttccgtttgattccattccactccattccattccattccattccat

SEQ ID NO: 6277 - DNA, 183 bp, Protomyxzoa rheumatica
aagaatcatcatctaatagaatcgaatggaaccgtcgaatggaatgaaatggaagcatcatcgaaataaattgaaggaaatcatcgaatggaattgaacggaatcatcaattggaattgaatggaatcatcattgaacgggatcaaatggaatcatcgaatggacacaaatggaataatcgaa

SEQ ID NO: 6278 - DNA, 255 bp, Protomyxzoa rheumatica
gcgtgatggcctgacgatggattcccatgtgcggcaacatggggagtctgcagagtggccggtttggtaactggcaaggagaccgaaggcaccatgccggacttccactcttccctgcatatttccgggtgcccgcagagctccaggagcaaacagtcagcatgacacatctcggaactgatcaacaaagtgacgtaacacttgtctagtctctacctacaggggctttgtgacatatctctgcactgatcaccc

SEQ ID NO: 6279 - DNA, 194 bp, Protomyxzoa rheumatica
gcattatcagaatcttctttgtgatgtttgcattcaactctcagagttgaaactttgtttgatacatcagtatcgaaacactctttttttagaatctgctagggtatatttgaagtgctttgatgcctatagtggaaaaggaaacatcttctcataaacaagagacagaagcattctcagaaatttctttgtga

SEQ ID NO: 6280 - DNA, 234 bp, Protomyxzoa rheumatica
tgtctcttcacacgaggagaaaacccaccaaccctgtggggctggaccctacataccctaaaataaacaatcgtcctgttctccatataggtctctctagtctcccgagtcctctattccagcacttttgaaggccaaggtgggcagatcacttgaggccacgaattcaagaccaacctagccaacatggggataccccatctctattaaaaataaaaaaaaattagccaggcg

SEQ ID NO: 6281 - DNA, 126 bp, Protomyxzoa rheumatica
gtatataatacatactttggatactttgatattttatgtatagtttacaatatatgtgttgggtaaattgatattttttgtccagtatgtaatttatatttggtgtactttgatattttatgtaca

SEQ ID NO: 6282 - DNA, 185 bp, Protomyxzoa rheumatica
tacagcctatggtgaaataggaaatatcttcacataaaaataagacagaatctttctgagaaaatgctttgtgatgtgtgctttcatctcacagaggtgaacttttgttttgattgagtagtttggaaacagtctttctgtagaatccacaaatggatatttgcagtgcttttaggcctatggtg

SEQ ID NO: 6283 - DNA, 167 bp, Protomyxzoa rheumatica
gcttcctggaaatgtcactctcaaagtcgcctttttcacaattgtgaaagtctagtcatcagaagtttaattattgggttgcacaaaatctgcttagactccgaagcgtgagtcttgtgagccattttcatcaacccatttaagtggacaagcttcaaaatgcaacc

SEQ ID NO: 6284 - DNA, 150 bp, Protomyxzoa rheumatica
tggaatcttcgaatggactcaaattgaatcttcatcgaatggaatcgaaaggaatgttcaaatggactcgaatggaatcattgtcaaatggaaactaattgaatgttagaatggacttgaatggaatcatcatcgaatgggattgaatgg

SEQ ID NO: 6285 - DNA, 133 bp, Protomyxzoa rheumatica
atggaatgcactcaaatggaatcataaacgaatggtatcaaatggtatcatcgaatgtaatcgaatggagtcatcatcagttggaatcaaaaggaatcaccgaaaggattcaaatggaataatcatcgaaagg

SEQ ID NO: 6286 - DNA, 203 bp, Protomyxzoa rheumatica
tatgttagggactcacattcagaatttcctaccagtgctctggaatcctctgtgagggacagcctttcatactacagaagcagtgttctggaattgtatttgaggaataaacattcacagtacagcaggagttttctggtatcctaagtaagggacaaacattcagacccacttagcagtgttgtgaaatcctatgtcaagga

SEQ ID NO: 6287 - DNA, 123 bp, Protomyxzoa rheumatica
aagatatttcgttttctaccatagatctcaaagcgctctaaatgtacacttgcaaattccactaaaacagtttcaaaactgctctatcaagagaaaggttaaactccgtaaactgaatacgca

SEQ ID NO: 6288 - DNA, 180 bp, Protomyxzoa rheumatica
tgcttctgtgcattttttatgtgaagaaatttccttttcctcagcacgccttacagcactgcaaatatctacctgcagatcgcactaaaagagtatttcaaaactgcacaatcaaaagaaaggttcacctctgtgaaatgaagtcacacatcacaaaaagtatctcagactgttcctctg

SEQ ID NO: 6289 - DNA, 122 bp, Protomyxzoa rheumatica
caccgtgagatgaatgcacatatcattgaagtttctcagaattcttctgtatagtttatatttgaagatattccattttcccctataggccacaagggttccaaatatccactttcagattc

SEQ ID NO: 6290 - DNA, 186 bp, Protomyxzoa rheumatica
ccctttgcagattctacaaaagaaactgtttccaaactgctgaagaattagaaatgtttaactctatgagatgaattcacacatcatgaagtagttttacagataacttctttctagtttttatatgggaatattcagtttgtcaccataggcctcaatgcgctatgaagtgtccctttgcatatt

SEQ ID NO: 6291 - DNA, 134 bp, Protomyxzoa rheumatica
actagaaagaagttatctgtgaaaatgctttgtgttgtttggattcttgtcacagtgttaagccattcttttgattcatcaagttggaaacagtcctttggtataatttgtgaaagtgtatttgaaagcacatt

SEQ ID NO: 6292 - DNA, 135 bp, Protomyxzoa rheumatica
cattcaagtccattccactccagtccattatattcgagtccgttctataccattgcagaccattccgttcaactttattctattccattccattcgattccactcctttcgattgtattccattctagtccattc

SEQ ID NO: 6293 - DNA, 145 bp, Protomyxzoa rheumatica
caaaggaacagggacattttgtctttggtctctccctttctcctttaatacaaatgaaaaggggaataataggatatactccatactttcaatataaacatgtaggaaaaccgtgtcctaaaaattttgagggcccaactaaaac

SEQ ID NO: 6294 - DNA, 141 bp, Protomyxzoa rheumatica
atgtaatgtaatgcaatgtaatgtaatgtaatggaatcaaatggattggactcaaatggaatgggctctaacagtgtggaatcaaaaggaaggggatcgaatggattggaagcaaatgggatggaatcgaacgaaatggtc

SEQ ID NO: 6295 - DNA, 206 bp, Protomyxzoa rheumatica
agtttttatgtgaagttactcctgtttccaaagaaggcctcaaagcactccaaatatccacatgcacaaactacgaaaagagtgcttcaaaactgctcaaagaaaacatgtgttcaaatcggtgagttgaatgaaaacatcacaaagaagtttctcagtattcttctgtctaatttttttgtgaagatatttcctttccaccatag

SEQ ID NO: 6296 - DNA, 396 bp, Protomyxzoa rheumatica
ccattcgattccattccattccaattgattcttctccgttccattacattgcattccattctataccattccattccttttggttacattaaattcgatttcattccattcgagtcaattactttgcaatccattacattcgagtccgttctattccagtccattccattcgattccattccattgcattccattccatactattgcattccatttggtcccaatgttttcgaataagttcccttcgaggccattcctttagagtccattctacttgagtccattccattcgagtccattacatttggatccatttcattccattccaatccattccattccattcggatccatttcattccattccattccattccattccattcgatgccattc

SEQ ID NO: 6297 - DNA, 122 bp, Protomyxzoa rheumatica
gaatggaaagtaatggaatggattcgaatggaataagttgaaatggaatagaatgcaatggaatggaattgaagggactcgaataggtcaaaatgtcttggtatggaatggactcaaatgga

SEQ ID NO: 6298 - DNA, 149 bp, Protomyxzoa rheumatica
cattcaattccattctatgataattccatttgtgtccattagatgactccattcgattccattcaatgatgattcctttcaagtcctttcagtgattccattaggttccattcaatgatgattccatacaattccattcgatgattcca

SEQ ID NO: 6299 - DNA, 122 bp, Protomyxzoa rheumatica
tctttgtgatgtttgcttttaggtcacagagttgaacattccttttcatagagcaggtttcaaacactcttactctagtatctggaagtagacatttcgagcgctttcaggcctatggtgaa

SEQ ID NO: 6300 - DNA, 153 bp, Protomyxzoa rheumatica
gtggaatggaatggaatggagtggaatggaatacaatggaatggaatggactccaatggaatggaatggtctcgaaggtaattgaatggaatgaaagcgactcaaatggaattgaatggaatggaatggactctaatgggatagaatggaatt

SEQ ID NO: 6301 - DNA, 142 bp, Protomyxzoa rheumatica
ttgaaacctaacccctgataagttaggtttgaattaggaggcaaagactttaggaagtgatttcaccatgaaagcaaagagcccatgaatgaccttgaagcccatgaagtggccttgtaaaagggagccaagggagcttgtt

SEQ ID NO: 6302 - DNA, 272 bp, Protomyxzoa rheumatica
atctctgcactgatctcccaggtgctgtaactttagtctaccctctggctacagggcattgtgacatatcactgcactgatcaccctggtgatataacacttgtctaggctctgcctacaaggggcttgtgacatatccctgcaatgatcacctacgtgatgtaccaattgtcaaggctctgcctacagagacattgcgatgaatctctgcactgatcacctaggtcatggaacccttgtctaggttctgcatacagtggcattgtgacata

SEQ ID NO: 6303 - DNA, 123 bp, Protomyxzoa rheumatica
tgtgcattcatttcatggagttgaactttcttttgatggagaacttgggaaacagtctttttgtagtatctggagagggatatttgcgaccggttgaatacccatggtgaaaaaggaaatatc

SEQ ID NO: 6304 - DNA, 139 bp, Protomyxzoa rheumatica
tccaaagaaatatttaactctgtgagatgaatggatacatcacaaggcagattctcagagagcttctttctagtttttaactgaagatgtttgtttttcaccataaccctcagtactctctgaaatatccctttgcaga

SEQ ID NO: 6305 - DNA, 323 bp, Protomyxzoa rheumatica
ctggaatcctatgtgagggacaatcattcagaccacagctaaggtgttctggaatcctatgtgtgggacaaatatttggaccctcgtagcattgttctgcaatcctgtgtgaggaaaatacattcagaacacagcaggggtgctctggagtccaatgtgcgggacaaacattcatgcccttgtagcagtgttctggaatactatgtaagggacaaacttttagacccatgtagcagtgttctggaatcgtaagtgagggacactcagaagccaacagcagtgttctggaatcctaagtgagggacaaacgttcagacatcagc

SEQ ID NO: 6306 - DNA, 221 bp, Protomyxzoa rheumatica
cagtgttctggaatcctgtgtgagggacaaacattcagaccccaacaacagtgttctgtaatcctatgtgttggacaatcattcagaaccccatagcagtgctctggaattctgtgtgagggacaagtattcaagctgtcattgcagtgttctggaatcccgtgtgagggacaaacattcagacactggtagcagtgttctggaatccaacgtgagggaca

SEQ ID NO: 6307 - DNA, 157 bp, Protomyxzoa rheumatica
aatctgagaaactactttgtgatgtgtgcacttatgtcacagtgttaaatatttcttttcattgaggagttttcaggctctctttctgtagaatatgcaagtggacatttgaagcgctttgaggactatggtggaaaacgaaatattttcacataaa

SEQ ID NO: 6308 - DNA, 151 bp, Protomyxzoa rheumatica
ccatatgaaaagaaagttttaaccttgtgagatgaatgcacatatcacaaagcaggttctcggatagtttccttttagtatttgtgctgggatattcactttttcaccattgccttcattgagctcccaaatatctattcacagaatggac

SEQ ID NO: 6309 - DNA, 167 bp, Protomyxzoa rheumatica
tatttacctctgtgagatgaatgcacacattacaaagcagtttctcagaaaccttctgtagagtttttatgtgaaaatatttcctttttccccgtaggactcaaagcgctcacaatatccctttgctgattctacaaaaagactgtttccaaactgctcaatcaaaa

SEQ ID NO: 6310 - DNA, 147 bp, Protomyxzoa rheumatica
acaaggaagtgtctgagaatgcttctgtctagttttcaagtgaatatattctcgtttccaacgagggcttccaagcactccaaatatccaactgcagatagtacaaaaaaagtgtttcaaatgtcctctatcaaaaggaatgttcaa

SEQ ID NO: 6311 - DNA, 130 bp, Protomyxzoa rheumatica
gctggtcctgaattcctaacctcaggtgatctgcccaccttggcctcctaaagtcctgggattgcaggcataagccacctcacctggccgattttttttttgttttgttttaaaattcattgtgtctgat

SEQ ID NO: 6312 - DNA, 151 bp, Protomyxzoa rheumatica
aatctgcagaaggatatttgtgagccgattgaggcctatggggtgataggaaatatgttcacataaaaaccagacagaaaatttatgaaaaacttctttgtgatattcgctttcatctcacagagttgaaactttcttttgattgagcagt

SEQ ID NO: 6313 - DNA, 189 bp, Protomyxzoa rheumatica
tttttgtctagtttttaggtgaagatatttcttatttcccaagaggcctcaatgggctctcaaatattctctttcagattctactaaatgactgtattgaagctgctcaatcaaaagaaaggttcaacagtgtgagaagaaagcacacattcctaggaagtttctcagaattcttatttctagtttttt

SEQ ID NO: 6314 - DNA, 126 bp, Protomyxzoa rheumatica
ggcctcaatggggtcctaaatatttcttcgttgattctccaaaaaaagggcttggcactttctgcataaaagaaaggcttaactctgtgaggtgagtctacaaatcacaatgcagtttcatggtag

SEQ ID NO: 6315 - DNA, 184 bp, Protomyxzoa rheumatica
gcagaaaccccaaaattacataaataacttcttcttttccctccttcctgcctcacaatccctcttgctagagtaaaataattgctacatcagtggtctcattggttctcgttccacaattttactggttattacaataacttttccgtctgtttttagcaatacgatgtgacgtctgtaaaat

SEQ ID NO: 6316 - DNA, 174 bp, Protomyxzoa rheumatica
tttcattcgagtccatttgatgattccattcaactccagtcgattacgattccattcgattccattcaatatttccattcgagtccattcgatgatgattccatttaattccatttgatgattccattagattccattggatgattattgcttttgtgtgcattcaatgattcc

SEQ ID NO: 6317 - DNA, 140 bp, Protomyxzoa rheumatica
gtgaagtccaggctgaggaggtctcaggtggaaatgataaaattattgggaactggggcaaaggttacatgtttcataccttagcgaaggacttggctgcattctgttcgtgccctagggatctgtggaagtttgaatct

SEQ ID NO: 6318 - DNA, 149 bp, Protomyxzoa rheumatica
tcttttgtagaatctgcaagtggacattttgagcgctttgtggcctatggtagaaaaggaaatatcttcaactaacatctacacaaaagcaaagtgagaaacttctttctgatgtgtgcattcatctcacagagttaaacctttctttt

SEQ ID NO: 6319 - DNA, 159 bp, Protomyxzoa rheumatica
ccaaatggctcaatcaaaagataggctcaactctgtgtgttgaatgcacacataataaaggagtttctcagaataattctgtgtagtttttatattaagatatatcttttcccaaaataggcctcaaagccctccaaatagctactttgagtttctaca

SEQ ID NO: 6320 - DNA, 322 bp, Protomyxzoa rheumatica
tctaccaaaagcctgaagagagcagttccaaacttattccatgaagccaccattagctcataccgaagccagacaaagatactacaaaaacccatagactaatatcccttatgaacacggatgcaaaactactcagcaacatcctagctaaccacattcagcagcatactagcaagattacaccccatgaccaaggggaatttattactggaatgtaaggaagatttagcgtatggctggtttcagtgcaatggtgtttacaactaattgatcacaaccagaatagatttctttattctttttccagtctcactggttcact

SEQ ID NO: 6321 - DNA, 136 bp, Protomyxzoa rheumatica
aatgattctatttgattccattcgatgatgatgccattcgactccgttcgatgattccattggagtccatttgatgattctattttattccattcgatgatgattctgctcaagtcagtttgatgatgattccatt

SEQ ID NO: 6322 - DNA, 154 bp, Protomyxzoa rheumatica
tgggttctgagtgtttctccctcacataggaaaccaggacactgctactgggttctgaatgattgtacctcacattggactccagaacactcctactgtggtatgaatgtttgtctctcagacaggattacagaacactgttgctgggttctga

SEQ ID NO: 6323 - DNA, 140 bp, Protomyxzoa rheumatica
tcaaacaagtttctgagaatgcttctgtctaatttttatgtgaagatatttcattttccaccattccagtcaaagtgctacatgtgtccacttgcagattctacaaagagagtgattcaaaactgctctatcaaaagaaa

SEQ ID NO: 6324 - DNA, 122 bp, Protomyxzoa rheumatica
atactgtattagtctgctcttgcactgctataaagaaatgtctgagactggtgctgggtgcggtgtctcacgcctgtaatcccagcactttgggaggcggaggcaggcggatcacgaggtca

SEQ ID NO: 6325 - DNA, 228 bp, Protomyxzoa rheumatica
ccattcgggtccttcacattccattgcattccattctgttctgtttgattcccatttgttcgattccattttcttccagtccatttctttcgtatacagtcctttccagtccattccataggagtcccatgctttccattctattcaattcgatgtcattcctttctattctatttgatttgggtccattcaattcgagtccattccattccatgccattccattcta

SEQ ID NO: 6326 - DNA, 158 bp, Protomyxzoa rheumatica
tattgtcacataaaatctagacagaagcaatctgagacttctttgtgatgtgtgcattcaccacacattgtttaacctttcccttgattgagcagttttgaaactctttttgtagaatctacaagtctacatttggagtgctttgaggcctatggtgg

SEQ ID NO: 6327 - DNA, 163 bp, Protomyxzoa rheumatica
catcacaaagaaggttctcggaatgcttctctgcagcttttaagagaatgtatttccttttccacagcagacaacaaaggactccaaatatccacttgcagattgcacaaaaagagaatttcaacactgctctatcaaaagacaggttcaactctgtgatatg

SEQ ID NO: 6328 - DNA, 177 bp, Protomyxzoa rheumatica
aaacactctttttgtagaatctgcaattggatatttggagtgcgttgaggcctattgtggaaaagggaatactttcacataaaagctacacagaagctttctcagaaagttctttgttttgagtgcagtcatctcacagagttgaaatttcttttcattgagcagttttgaaacact

SEQ ID NO: 6329 - DNA, 196 bp, Protomyxzoa rheumatica
aattacttttgcactgcagtcattcaagtttacaagattttgacatatgaaattaagtggtataagggtacctacaaattgatgggtattacacgtttacatattaatatgataccaactacaatttaaaatatttagaaatggtttatgaaatttagtaatgctaccagagttaaaggatgtagttaattacatc

SEQ ID NO: 6330 - DNA, 122 bp, Protomyxzoa rheumatica
acaggggcattttaacatatcactgcactgatcaccgagacgatttaactcttgtgtaggctttgctgacagggagcattgagacatatttctgcactgatcaccgaggtgatgcaactctt

SEQ ID NO: 6331 - DNA, 140 bp, Protomyxzoa rheumatica
gcagcgcctagggctgcagaagacgtaatgctctggaaagaaccctgggtgcaattgaaagaggaacctgagaatgataggcacaatcgggtgaggacaaagcggccatttgggaaaagggaaggtgtcttcgtagagta

SEQ ID NO: 6332 - DNA, 136 bp, Protomyxzoa rheumatica
cataccattccattccgtttaagtccgttcctttccattacattcgagtccattagtttccattacattcctttccattcttgtccattccataccacttcatttcgttctattaaaatccattcacttccattcc

SEQ ID NO: 6333 - DNA, 129 bp, Protomyxzoa rheumatica
gaatgcacacatcacaaagatgtttctcagaaggattctgtgtagtttttatctgaagatatttgcttttccacagacggcctcaaagcgcaccaaatatcgactagcagattccacaaaaccagtgtt

SEQ ID NO: 6334 - DNA, 132 bp, Protomyxzoa rheumatica
cattccattccactcgagtcatttcctttcctttctattcatgtccattccattccattggtgtttattcctttgaattccattcgagactattccactgtattccactcgaatctattccattccattcca

SEQ ID NO: 6335 - DNA, 141 bp, Protomyxzoa rheumatica
aaggaaatatcttcacataagatctacggagaagcgttctgtgaaacttctttgtgatgtgtgcattcatctctcacagatttgaaactttctgttgattcagcagttttgaaacactctttttgtagaatctgcagttgg

SEQ ID NO: 6336 - DNA, 159 bp, Protomyxzoa rheumatica
accaaaagcctcaaagcggtctgaatatccacttgcagattctacaaaaagagcgtttcctaacttctcaataaaaataaacgttcaactctgttagatgaatgctaacatcacaaagaattttctcagaatgattctatgtattttttttggaagata

SEQ ID NO: 6337 - DNA, 153 bp, Protomyxzoa rheumatica
ttgggatatatgtactcaactaacagagttgaacctttctatttagagatcagttttaaaaagctctttttgtggaatccgcaagtggatatttgaatagctctgaggatttcgttggagacgggattacgtataaaaagtagacagcagcat

SEQ ID NO: 6338 - DNA, 146 bp, Protomyxzoa rheumatica
tcgaaatgtccacttccagatactacagaaagagtgtttcaaaccttctctacggaagggaatattgaactctgcgatttaaaagcaaagatcacaaagaagcttttgagaatgctgctgtctactttttatacgtaatcccgtct

SEQ ID NO: 6339 - DNA, 143 bp, Protomyxzoa rheumatica
tgaggatctcattggaaatgggaatacatataaaattacacagcagcattgtcagaaacttctttgtgatgtttgcattcaagtcatagatttgaacatttcctttcatagagcaagtttgaaacactcttttggtagtattt

SEQ ID NO: 6340 - DNA, 201 bp, Protomyxzoa rheumatica
tgtcacaatgtctccagtaggcagagattaaacaagagttacatcacctgggtgatcagggcagagatatgtcacagtgcccctgtaagcagatcccagacaagagatgcatcaccttcgtgatcagtgcaggcatatgtctcagtgccccctgtcggcgcagcctatacaagagttacatcatctcggtgatcagtgcag

SEQ ID NO: 6341 - DNA, 150 bp, Protomyxzoa rheumatica
agagtctgtgaagggatatttgggagtgcattgaagcctatggtggaaaagaaaatatcttcagaggagaccggacagagctttctgagaaactggtttgttatgtacgcattcatgtcacagagttaaaactttcctctgattgagcag

SEQ ID NO: 6342 - DNA, 224 bp, Protomyxzoa rheumatica
ctccttccattcgtggtctctccattcaattccattcctgtcaattccattggattcctttcgattccattcaattgcattccaatacattccattccatttgagaccaatgcattccttgccattcaattctagtcccttccattccaccccttccattcgtggccaatccattcaattcctttcgagacagttccatttgaatccattcgattccattccat

SEQ ID NO: 6343 - DNA, 129 bp, Protomyxzoa rheumatica
agaacaaagcagttcagaatagcattgtgagggctcagaaaactaaattgttattggaattacaccccacaaaactagaccagtacctgtacactaaacctaagtaagacaactgcctgttaaaattga

SEQ ID NO: 6344 - DNA, 160 bp, Protomyxzoa rheumatica
tcaaaagaaaagttcaactctgtgagatgaatacacacatcgcaaagaagtttctcagaaagtgtctctctagtttttatatgaagatatttcctaacaccccataggcatcaatgggttcacaaatatccctctctagattctacaaaatgacagttgg

SEQ ID NO: 6345 - DNA, 141 bp, Protomyxzoa rheumatica
acaaaaagagtgtttcaaaactgctctatcaaaagaaaagtttcactctgtaagctgaatgccaacatcaaaaagtagtttctgagaatgattctgtctaatttttctatgaagatatttccttttctaccacaggcctca

SEQ ID NO: 6346 - DNA, 190 bp, Protomyxzoa rheumatica
cagggcagagagactgaggtttgcaactctaacgacagagaaccagattgactgtgtttcgcccccagatctagctcagccctgctgggttttccactccgaggaggtcagcgccaaagtgttaattttgtatctctggctagaggcacagtgcctgcatgcagtaggcgctcagagtttgtttcattga

SEQ ID NO: 6347 - DNA, 149 bp, Protomyxzoa rheumatica
aaattctacaaaaacagtgtttccaaactgttccatcaaaaggaggacttaactgtgtgagacgaactctcatatcagagagcagtttctagtaacacttctttccaggttttatctgaagatatttcctttttcaccatagggttttt

SEQ ID NO: 6348 - DNA, 290 bp, Protomyxzoa rheumatica
ctgagagacttctttgtaatgtgcgcattcatcttatagagttaaaccattcttttgattgagctttttggaaacactctttttgtggcatctgtaagggtaaacttctgagcccattgagacctattttgaaatatgaaatatcttcaaataaaaactagatagaaagtttctaagaaactcctttgtgatgtgtgctttcatctcacagagttaaaactttattttgattgagcagtttggaaacacttttttttatagaatctgcaagtggatatttggagctcttt

SEQ ID NO: 6349 - DNA, 127 bp, Protomyxzoa rheumatica
tttatgtgaagatatttccttttccaccatagggtgcaaagagctccaaatatccacttgcagattctaccaaaaaagagatacaaaagttctcaatggaaagataagttcaactctgtgagttgaa

SEQ ID NO: 6350 - DNA, 149 bp, Protomyxzoa rheumatica
ttgacagaagaattctcagaatcttctttgcgatgtgcaaattcaactcacagtgttgagccttcttttgattgagcagttttgcagttctatttttgtagcatttccaagtggacatatagagaggtttcaggcctgtggtagaaaag

SEQ ID NO: 6351 - DNA, 217 bp, Protomyxzoa rheumatica
gtggaatggaatggagtggtgtggaatggatagcaatggattggaatggattggaaagcaatggagtgtagaggtgtggagtggaatggaatggaaaggagtgaagtggagtagaacggaatggaatacaatggagttgaatagaatggaaaggaaagtagtggaatggaacggaggggagtggaatggaatggagtggagtggaatggagtggagt

SEQ ID NO: 6352 - DNA, 142 bp, Protomyxzoa rheumatica
ccactccacaccactccactccaatacattccattccattctactgcattcctttcgattcctttatttcaactgaatctcatcctgtcacccatactggaatgcagtggcacaatcttagctcacatttcatttcaccatt

SEQ ID NO: 6353 - DNA, 122 bp, Protomyxzoa rheumatica
attttactgttgttggatgaagtctataaatagcaattgtatttgtaagaattaaagaaagaggagagaaacatgaaaggtgtcttgccagttaagacagatttatttcatagaaaacaaac

SEQ ID NO: 6354 - DNA, 130 bp, Protomyxzoa rheumatica
tgaaggcacagagcccaaagtcgtttctcagaaagcttctttctagtttttatctgaagatgattcctttttcaatataggcctcaatgctctctgaattatccctttgcagatcctacaaaaacaatgt

SEQ ID NO: 6355 - DNA, 159 bp, Protomyxzoa rheumatica
gcaatgaggcctgtggtggaaaaatatatatcttcagagaggaaatagacagaggctttctgacaactgcgttgtgatgtgtgcattagtctcacagaattaaacctttcttttgattgatcagtttggaaacactgtttttgtagaatgtgtgaaggg

SEQ ID NO: 6356 - DNA, 141 bp, Protomyxzoa rheumatica
cttttgttttgattcagcaggtaagaacacttgttttggagaatctgtgaagagacatatgggagagcattgagggctatgtttaaaaactgaatatagtcagataaaaactagaaaaaagctacctgtgaaactgcttta

SEQ ID NO: 6357 - DNA, 211 bp, Protomyxzoa rheumatica
cgaatggaatcgaatggaatcatcatcgaaagtaatcaaatggaaccattgaatgaaatcgaatggattcaccatcgaatggagttgaatggaatcatcatcgattggaatctattggaataattaattaagagaatcgaatggaatcatcatcgaatggtatcaaatggaatcatagaatggttttgaatggaatcatcataaaatggaa

SEQ ID NO: 6358 - DNA, 200 bp, Protomyxzoa rheumatica
aaagaaatgttctaccccaggaggtgaaagcacacagcatgaagacaattctcagaaagcctctgtctggtttttatgtgaagatatgtcctttatcaccataggcatcaaaaagctcagaaataaccttctgcatattctagaaaaagactgtttccaaactgctcaatcaaaggaaatttcaactctgtgagctgaat

SEQ ID NO: 6359 - DNA, 133 bp, Protomyxzoa rheumatica
ttggattcagcagtttaaaaactctttttttgtagaatctgagaaaaggcatttgggagcactttgaggcctatcgtgacaaagaaaatttcttcagataaaaagtagaaagaagctttctgagaaacttctt

SEQ ID NO: 6360 - DNA, 138 bp, Protomyxzoa rheumatica
ggattccagaacactgctacaagggtctgaatgtttgtccattaaatgatattccagagcactgctaatggggtctcaatgtttgtccctcagacagcattccagaacactcctgctgtggtctgaatatttgtccct

SEQ ID NO: 6361 - DNA, 149 bp, Protomyxzoa rheumatica
aagctctactaacaggggaatagtgagagatctcaccactgatcactcaagtgatgtaactattgtctaggctttacctagacggggcgttgtgacatacctttgcactgatcacccagttgatgtaactcatctaagttctgccaaca

SEQ ID NO: 6362 - DNA, 170 bp, Protomyxzoa rheumatica
attgcattccaatccattccagaacattccgttccattcgagtccatttcattccatttcattccattccattcgagttcattccattccgttactttccattctattcgagtcccttcaattccactcctatcctttggattcctttccactctattccaatcgagtcc

SEQ ID NO: 6363 - DNA, 132 bp, Protomyxzoa rheumatica
atcaaaaggatatttctcagagactttctttctagtttgtatcagaagatatttcttttttcgcaatagtcctcattactctccaaaatatacctttgaagattctagaattacagagtttcaaaactgctc

SEQ ID NO: 6364 - DNA, 130 bp, Protomyxzoa rheumatica
gaatggtatggaatggaatggaatggaatggaatagaatgtaatagaatggatgcaaaacgagtggaatggaatgtaatggaatgggatagattggaaacaaaccgagtggaatggaatgcaatggaatg

SEQ ID NO: 6365 - DNA, 168 bp, Protomyxzoa rheumatica
cctacagtggcattgtgacatatctctgcactgatcatccaagtgacgtaacacttgtctaggatctgcctaaagggattttgtgacataactctgcactgatcatcccggttttggggcttttgtctaggctttgtctaagggggcattgtgacatatttctgcact

SEQ ID NO: 6366 - DNA, 137 bp, Protomyxzoa rheumatica
gtaggcagaacttagatgagttacatcacctgggtgaccagtgcaaaggtatgccacaaagccccctgtaggcaaagtctagacaatagttccatcacttgggggatcagtgtcgagatctctcgcaattcccctgt

SEQ ID NO: 6367 - DNA, 144 bp, Protomyxzoa rheumatica
tggaagagtttgtgtttccaggaatgtatccactttctctagattttctagttgtgtgcatagaggtattcataatagtctctgaagatattttgtatttcagtgggattgtttgtaatgtaacctttgtcatttctgattgtg

SEQ ID NO: 6368 - DNA, 134 bp, Protomyxzoa rheumatica
acaccttctagatatccagcaggattgaccttgcccagccccatacctgaaaggggtctcccttgaggagcagccgaggaccgggactcccctcccacgattcaaagagtggatgagtgctcagcgtcgggaaa

SEQ ID NO: 6369 - DNA, 150 bp, Protomyxzoa rheumatica
catcacaaagaagtttgtcagaatgtttctgtctagttcttaagtgaagatacttcctttttgaccataggcctcatagcgctccaaatatccagttgcagattctacagagagttaccaaattattcaatcgaaagaaatgttcaactc

SEQ ID NO: 6370 - DNA, 192 bp, Protomyxzoa rheumatica
cataggattccagaacactgctacgagagtctcaatgtttgtccctcacgtaagattccagaacactgctacgaggatctgaatgtttgtctcacacgtaggattccagaacaccctagctgtggtctgaatgattgccccacacaaagcattctacaacagtgtcactgggttctgagtgttgtccctcaa

SEQ ID NO: 6371 - DNA, 219 bp, Protomyxzoa rheumatica
gaagaattctcagtaactttttgtgttgcgtgtactcaactcacagagatgaaccttagtttagaaagagatgatttgaaacacactttttgtggaatttgtaggtggagatttcaggcgctttgatgcctttggtagaaaaggaaatatcttcgtataacaactagactgaatcattctcagaaactacgttgtgatgagtgtgttcgactcacagaa

SEQ ID NO: 6372 - DNA, 125 bp, Protomyxzoa rheumatica
cctctttgatttgcaaacaaaaccctagatggtgatttttttatttgcctactgatatggtttggatatttgtcacacacaaatcccatgttgaaatgtaattcccagtgttgaaggtgggcctg

SEQ ID NO: 6373 - DNA, 141 bp, Protomyxzoa rheumatica
ttgggtaccttgatattttatgtacagtgtatcatatatagtttggttactttgatatgtcatgtacagtacataatatatactgtgggtattttgatattttatatacagtatataatagtttgtgtactttgatatttc

SEQ ID NO: 6374 - DNA, 133 bp, Protomyxzoa rheumatica
ttcctttccattccattcgagtccattccattcaattccattacattctgtttgattccaatctgtccgattccatttttttccagtccaatccattcgagtccattatattccaatccattcctatcgattc

SEQ ID NO: 6375 - DNA, 173 bp, Protomyxzoa rheumatica
cgagaccacagagagaagatgcctccccggcgtgaaggcctgacgatagattcccgtgtgtggcaaaatggggagtctgcagtgtggccagtttggaaactgggaaggagagcgaaggcaccttgccggtcttccaccattccctgcatgtttctgggtgcccacagagctcc

SEQ ID NO: 6376 - DNA, 144 bp, Protomyxzoa rheumatica
tcatcccatgaaaacgaacggaatcagaaaatggaattgaatggaatcatcaaatggaatcgaaaggaatcatcatccaatgaaatcaaatgcagtaatccgatggaatcaaatggaatcatcataaaatggaatcgaatgcaa

SEQ ID NO: 6377 - DNA, 270 bp, Protomyxzoa rheumatica
attccattcgtttccattctattagactccattccactccagttcattcctttcgagtccattacattccagtccattccactcgaatccaatccattccattccattcgacatctttccattacactccattccattctattaattttgattctaatcaattccattccaatagaacaccttcctttcgattccattcctttcgactcctttccattcgagtccattctattccattctattccattccattaaattccattcctttga

SEQ ID NO: 6378 - DNA, 197 bp, Protomyxzoa rheumatica
ttcaattcaagtccattcgatgattccattggagtccaaacgatcattccgttcgattccattcaatggtgattccattcatgtccattcgatgaatccattcaattccattcgatgatgactccattcgagtacattcgatgattccatttgattccatttgaagatgattccattcaattccattcgaagatgat

SEQ ID NO: 6379 - DNA, 243 bp, Protomyxzoa rheumatica
cctgaaagaggaggttagtcatttgcccgtctctgacaacattgctctgaattttaccacattttgacaacaaatactatctcacattttcgtgaatcagaatctcgatatagcttagttgggtgcctctgcctcaaggtcccctatgaggctggggctgtgatttcaactgaagctggatttggggagagatcagcctccaatctgcctcatggaaattggcaagatgcagtgtgaactgag

SEQ ID NO: 6380 - DNA, 147 bp, Protomyxzoa rheumatica
tcgattcaatgatgattccatttgagtccattcagagatgcaattcgagtccatggaatgattccattgggttcaatttgatgaagattacatgggataccattcgatgattccattctattccattcgttatgattccattcgatt

SEQ ID NO: 6381 - DNA, 140 bp, Protomyxzoa rheumatica
caaatatcacaaagcagtttctgaagaacttctgtctggttattatgttaaggaatttccttttctaccatagacctcaaagtgctctaaatatacacttgtaaattccaaaaaaagagtgtttcaaaactgctctatca

SEQ ID NO: 6382 - DNA, 125 bp, Protomyxzoa rheumatica
tatttcctttttcaccatagccctcaaagtactccaaatgtccacttgcagataccacaaaaagagtgtttctaatctgccccatcaagagtaaggttcatctctgtgagttgaatgcactcatc

SEQ ID NO: 6383 - DNA, 283 bp, Protomyxzoa rheumatica
tagaatctgaaagtggacatttggtgcgattggaggcccagtttgaaaaaggaaatatcttcaccttaaatgtagacagaagcattctcagaatctaatttgtgatgtgtgttctcaactcacagagttaaacttttcctttgaaacagcaattttgaaacactcttcttgtaaaatttgcaagtggatattaggacatcattgaggatttcgttggaaacggaatatcttcacataaaactaaacagaatcattcgcagaaacttctttgtgatgtgtgcat

SEQ ID NO: 6384 - DNA, 130 bp, Protomyxzoa rheumatica
cctagacaagacaagagtcacatcaccttggtgatcagtgcagcaatatgtcgcaatgcccagtaggcagatccaacacaagagttacaacacctgggtgatcagtgtagagatatgtcacaatgccacc

SEQ ID NO: 6385 - DNA, 132 bp, Protomyxzoa rheumatica
aatccacacatcagaaagcagtttaacagatgatttttcttctagcttttaatctggggatattcagtttttcctcataggccacaatgggctcccaatgtcccttcacaaatacatcaaaaagagtgtttc

SEQ ID NO: 6386 - DNA, 149 bp, Protomyxzoa rheumatica
tagtttcacagatgcttatttctagtttttaatctggggatattcagtttttccccagagacctcaatgggcactgaaatgtccctccacagattctccaaaagaaatgtttcccaccttctgaatcaaaagaaaattttaactctgtg

SEQ ID NO: 6387 - DNA, 156 bp, Protomyxzoa rheumatica
tatgggaagatatttccattttcaccataggcgtcaaagcactcctaatgtccacttcccgatactacaaaaagggtgtttcaacccggctctatgaaattgaatgttcaactctacgagttgaatgaaaagatcatgaagaagtttctgagaatg

SEQ ID NO: 6388 - DNA, 144 bp, Protomyxzoa rheumatica
gatatgtgagaattccagtgtaggcagagtctagacaagtattacatcacctaggttatcagtgcagttataagtcgtaaagcctcctgaaggcagagcatagaaaagagttccctccccagagtgatcagtgcagagatgtgt

SEQ ID NO: 6389 - DNA, 142 bp, Protomyxzoa rheumatica
tatttctttttccaccatagccctcaatgcgctccaaatgtccacttgcagattatacaaaaatagtgtttcaaaactgccttatcaaaaggaaggttcaactttgtgagttgaatgcatacatcacaagaaatttctgaga

SEQ ID NO: 6390 - DNA, 161 bp, Protomyxzoa rheumatica
gaatggaataatcaatgaacacgaaaggaacaatcattgaatggaatcaaatggaataatcaaatggagtcgaatgctgtcatcatcaaatggaatcgaatggaatcattatcaaatagaatcaaattgaatcatcaaatggaatcaaatggaatcatcgt

SEQ ID NO: 6391 - DNA, 161 bp, Protomyxzoa rheumatica
agtggaatagaatggaatgtgaagcaatggaattgaacggagtggagtggagtgtagtcgagtaaaatgcaaaataatggaagaaagtggaatggagtggagaggagacgagtgaaatgcaaaagaatggaagaaagtggagtggagaggaatggagtgga

SEQ ID NO: 6392 - DNA, 196 bp, Protomyxzoa rheumatica
acgcttgtagcagtgttctggaatcctatgtaagggacaaacactcagaacccaccaacagtgttctgcaatcctatgtgagggacaaatattcagaccctcgtaggggtgttctggaatcctttttgagggacaaatgctcagaatccagcagctgtgttctggaatcctatgtgagggacaaacattcagacca

SEQ ID NO: 6393 - DNA, 175 bp, Protomyxzoa rheumatica
aacttgtttgtgatgtgtgcattcatctcaaagagttgaaactttcttttgatggaccaggtttgaaatactccttttgtggaatgtgccagggggcatttcgagcaccttgaggcctatggtggaaagtgaaatatcttcatataaaatcttgacagaagcaatcttagaaact

SEQ ID NO: 6394 - DNA, 192 bp, Protomyxzoa rheumatica
attgagtagttttgaaacactctttttgtagaatctgcaattggaaatttggagcgctttgtcacctaatgtggaaaaggtaatatcttcacatacaaactacacagaagattctgagacacttctttgttttgtgtgcattcatctgacagagttgaacctatcttttttttgagcagttttgaaactctc

SEQ ID NO: 6395 - DNA, 122 bp, Protomyxzoa rheumatica
gaaaggaatggaatgcaatggaatgaaatgcaatgtaatgcaatggaatggactcgaatggaatcaaaaggatggcaactgaattgaatggacacgaaaggaatggaatggaatggaatgga

SEQ ID NO: 6396 - DNA, 133 bp, Protomyxzoa rheumatica
aatggactcaaatagaattatggaatggactcgaatggaataattgaatggaatcatcaccaaatggactaaaatggaatgatcaaatagactcaaaatgaatgatcaaatggactctaatggaatcatggat

SEQ ID NO: 6397 - DNA, 125 bp, Protomyxzoa rheumatica
gctttgcgacatatctctgcactgatctcttatgtgatgtaacacttttataagcacagcctacagggaatttaggtattgtgaaatatctttgcactgatcaactaggtgatgtaactcttgtc

SEQ ID NO: 6398 - DNA, 223 bp, Protomyxzoa rheumatica
cctttgcagattctcaaaaaagggtgtttcaaaaccgctgaatcaaaagaaagtttctttctgtgagatgaatccacacatcacaaagtttcacagatagcttatttccagttttaatctggtgatattcagtttttccccacaggcctcaatgagctctcaaatttgtttttcagagattctccaaaaagattattttcaatctgctgaatcaaaagaaagg

SEQ ID NO: 6399 - DNA, 166 bp, Protomyxzoa rheumatica
cccttccagctgacctgcctaggatccctgagttccaggtccagagagagtctccacacagaggagggctgtcaagaatgacaagaaagaattcctgagcatcctggggatcccagggccggtccaggtacccggaagtgggctgtctactgcgcatgcgcgggat

SEQ ID NO: 6400 - DNA, 125 bp, Protomyxzoa rheumatica
ggattggagtggaatggaatggaatgcaaaggaatggagattagtggggtgaagtggagtgcaatggaatggaatggaacggaatggactgtattggagtctagtggaatggacgggagtggagt

SEQ ID NO: 6401 - DNA, 151 bp, Protomyxzoa rheumatica
ggtgatgatagtggtgaagactgtagtgatgttaatggtgaaggctatagtgatgttgatggtggtgaagactgtagcaatggttatgatgttggtgaagacaatagtgatggtgatgatggtgaagactatagtgatggtgatgttggtg

SEQ ID NO: 6402 - DNA, 138 bp, Protomyxzoa rheumatica
tcggttcatcttaaaacatttcagtcaaaagccctgtgttttatgtagaagaagaagcgtgtctgaaagaatgggtcactttatttatttttatttcttagacagggtccgtttccctgtcattctggctggggtgct

SEQ ID NO: 6403 - DNA, 136 bp, Protomyxzoa rheumatica
ctggaatcctatgtgagggacaaacattcaaaaaacagagagagtgttctggaaccctatgttacggacaaacattcagacaatcgtagcagggttctggaatcctatgtgagggacaaacattcaaaaaacagag

SEQ ID NO: 6404 - DNA, 163 bp, Protomyxzoa rheumatica
ggaattctcgggggcagagtatgcaaaactcctgggtttccatgcattcctcagtaagccagtgagcactctgctgacactccacacagctctgtgcttcagacccaaggccgtggtggctgagctcttgaggggacctcttcatctgcaggttgcaaagatc

SEQ ID NO: 6405 - DNA, 127 bp, Protomyxzoa rheumatica
ccactggtaattgcttctgtgcttgggacaggtgtagaagacagagtcatactggtcagtgaggtaaaagaatgagtggttgtgtgaggagaggttgtagttgtcatagaagtcactatatttgtgg

SEQ ID NO: 6406 - DNA, 176 bp, Protomyxzoa rheumatica
gattgcaatgtaactgatgtgaatggaatggaatataattgaatggaatcgaattcgaattgacataagaggaatggactggaatagtatggactcgtatgtaatggaatggaatgtaattgattcgaaaagagtggagttggatggaatgtaagaaaatagaatgcaatagaatg

SEQ ID NO: 6407 - DNA, 130 bp, Protomyxzoa rheumatica
cttccacatactaattcatggactccaactcctcatttagatcaaattgctactattatagggattgggaaaactcagtttgttaaattacatgattatgatcctggaaaaattaattgttgtccctctc

SEQ ID NO: 6408 - DNA, 233 bp, Protomyxzoa rheumatica
aaagttttaactgtaggagatgaatctacacatcaaagagcagtttcaaagatagcttctttctagtatatatcttgggatattcattttttacctataggccacaatgggtttccaaatgtgccttcgtgtattctacaaaaacactgcttccaaactgctgaatcaaaaggaaggcttaactttgtgagatgaatccacacaacagaaagcagttttacagatacattctt

SEQ ID NO: 6409 - DNA, 157 bp, Protomyxzoa rheumatica
agggaaaataatctatgtttgcagactccagaaagctgtctctcacataagaatttgcaatttctgggggaaaagaaaaagttgattgtgcaaagagattaccatggagtcttctctatggcaacaccacaaatgaaagctgattctcatcttccta

SEQ ID NO: 6410 - DNA, 140 bp, Protomyxzoa rheumatica
atggacttgaaaggaatcaccatcgaatggaatccaatggaatcatggaatggacaataatggaatcaccatcaagtggaattgaatggtatcatcgaatagaatctaatggaatcatcatcaaatggaatcgaacataa

SEQ ID NO: 6411 - DNA, 167 bp, Protomyxzoa rheumatica
tataaaaactagacagaagcattctcagaaactactttgttttgttcgcattgaactcacagagttgaggaatcgtcttgatagagcagttttgcaacactctttttgtagaatatccaagtggatatttggggcactttgaggccaatggtagaaaaggaaatatc

SEQ ID NO: 6412 - DNA, 164 bp, Protomyxzoa rheumatica
tccattccatactattgcattctgtttgattcaattgtagttgaataaattccattcgagaccattcttttcgattgcattctacttgagtgcattccatttttgtcctttacatttgtgtccaatacattccattccattccattccattccattctattcca

SEQ ID NO: 6413 - DNA, 153 bp, Protomyxzoa rheumatica
tgagcagtttggaaacagtctttttgtagaatctgcaaatggatatttggagtgcttttggcctatattgaaaaacgaaatatcttcccataaaaagtaggcagaagctttctgagaaatttctttgtgatgtgtgcattcatctcacacagt

SEQ ID NO: 6414 - DNA, 148 bp, Protomyxzoa rheumatica
atatatgcttgaggggacagataccccattttttattatgtattactcattgcatgactgcatcaaagtattttatgtacccccataaatatatacaccaactatgtacccacaaaaataaattaaaaattgaaatttaaattaaaat

SEQ ID NO: 6415 - DNA, 149 bp, Protomyxzoa rheumatica
gttctggaatccccagtgaggaacaaacattagacactcccagtggtattctggaatcctatgtgacggataatcattctgacactcgtagcagtgttctggaatcctatgtgaatgacaaacattcagaaaatcttagcaatgttctg

SEQ ID NO: 6416 - DNA, 172 bp, Protomyxzoa rheumatica
tggaatggaatcaacacgagtggaatgaattggaaaggaatagtatggaatcaaccagaatgcaaagcaatggaatggaatgcagtcgacctgaatggaatgtaatgtaatggaatggaatggaatcaactagaatggaattgaaaggaatggaatggaatggaatggaatg

SEQ ID NO: 6417 - DNA, 131 bp, Protomyxzoa rheumatica
actctgtgagatgaatgcacacatcacaaagctgtttctcaaaaaggttctttttagttttttccgaagatatttcctttttcaccataggcattagtgcacttctgaatatcccattgcagattctacaa

SEQ ID NO: 6418 - DNA, 166 bp, Protomyxzoa rheumatica
attttttatgtgaagatatttccttttccactttaggccgcaaaacactccaaatatccacttgcaaattatacaaaaggaggttttcaaaactgctctatcaaaaaaaagtttcaactctgggagatgaatgcacacatcacaaagaagtttctcagaattcttc

SEQ ID NO: 6419 - DNA, 124 bp, Protomyxzoa rheumatica
aggaatggattcgaatggaatggaatcaaatgaatggaatcgaatcgaatagaatccaatggcattgaaaataatcaaatggaatgcggataagtggcgtggagtggaatggagtggaatggaa

SEQ ID NO: 6420 - DNA, 125 bp, Protomyxzoa rheumatica
tttaactcaatcactcctccacattttgcattttctaagtcttaatttacatcttttatatcacttatcccttaacaacttattgtagttgttattttttttttgtattttaaccttcttactaa

SEQ ID NO: 6421 - DNA, 143 bp, Protomyxzoa rheumatica
taggccccaaggcactccaaatgtccacttgcagatactacaaaaagagtatttcaaaactcgtacatcaaaaggaagtttcaaaccttggagatgaatgcacacatccaaagaagtttctctgaatgcttcaatcttgtttt

SEQ ID NO: 6422 - DNA, 264 bp, Protomyxzoa rheumatica
aactccatgagatgaatgcacacatcacaaagtcgtctttcagaatgcttccgtctagttttaatttgaagatatttcctttttcactgtaggccttaaactggtcacaaaagtccctctgcagagactataaaaacacgttttccaaactgctccatcaaaagtaaggttcaactctgtgagatgaatgcaaacttcacaaagagtttctcagaatccttctgtcttgtttttgtgtgacgatattgtctttttcaccataag

SEQ ID NO: 6423 - DNA, 159 bp, Protomyxzoa rheumatica
agacagaagcaatctgaggaaactctttgtgatgtttgcattcacctcacaaatttgaaactctcatttgattgagcagtatggaaagagtcttttcttagaatctgcacagggatatttgtgagcccttcatgacctgtggtaaaataggaaatatct

SEQ ID NO: 6424 - DNA, 129 bp, Protomyxzoa rheumatica
attgcatttcactcgggttgattccactccattccactccattccattctaatccattccgttacaatccactcctgtttattccattccaatccataccattgtattccgttccattgtactcgggtg

SEQ ID NO: 6425 - DNA, 173 bp, Protomyxzoa rheumatica
gagtggaattgagtggaatggaaagggatggaatggaatgcaatgctgaggagtggagtggaggggagtttagcggagtggagtagggaggaatggaatggaatggaatttagtggagtggagtggagtacagtggaatggaatgggatggaatggaattgagtggagtggag

SEQ ID NO: 6426 - DNA, 146 bp, Protomyxzoa rheumatica
tgtaccacttgtcaaggctctgcctactgggacattgagacgtatctctgcactgaccacctaggtcatgtaactcttgtctaggctctgcgtacaggggcattttattatatcacttcactgatcaccgagatgatgtaactctt

SEQ ID NO: 6427 - DNA, 129 bp, Protomyxzoa rheumatica
tgggtgatcagtgcagagatgtgtcacaagcccctccagccagagattagacaagggttacatcagctgtgtgataagtgcagtaacatgtcacaatgcccctgtagccatatccttgacaaaagtgac

SEQ ID NO: 6428 - DNA, 123 bp, Protomyxzoa rheumatica
gttaatacaagacttggactgcttctgtgtctgtgttgctcttatatgggagggagagttgcgtgtctgtccccatacatctttctacagctacaggcatgtcccctgagtctgcttttagct

SEQ ID NO: 6429 - DNA, 156 bp, Protomyxzoa rheumatica
ttgaacacacacatcacaaaggagtttctgagaatgcttccgtctagtttttatatgaatataattctttttccaacataggcaacaaagaactccaaatgaacacttgcagattctaaaaaaatctgtgttccaaaactgttctatcaaaagaaa

SEQ ID NO: 6430 - DNA, 129 bp, Protomyxzoa rheumatica
gaatggattggaatggagtagaataaaatggactgaaaggtaatgggcacgaaaggaatggacacaaatagaatgaactcgaaaggaatggtctcaaatggaatttattccaatagaattgattcgaat

SEQ ID NO: 6431 - DNA, 220 bp, Protomyxzoa rheumatica
tgaaaggacacatcatgaagaagtttctgagaattcttctatctagttttatatgaagaaatcacgtttcaaagaaggccacaaagaggatccaaagatccacttgcagattctacaaaaagagtgtttaaaaactgctctatcaaaaggaagattcaactctttgtgttgaatgtgcagatcacaaagaagtttctgagaatgcttctgtctagttttt

SEQ ID NO: 6432 - DNA, 200 bp, Protomyxzoa rheumatica
atatcactgcattgatcaccgagatgatctaactcttgtccaggctctgcctatagaaggcccagtgacatatctctgcactgatcatctacttgatgtaactcttggttacacattgcctgcagaggcattgtgaaatatctccttactgatcaaccaggtgatctaagtcttgtctaggctctgcctacagggggttt

SEQ ID NO: 6433 - DNA, 135 bp, Protomyxzoa rheumatica
atgattccatttgattccattcgaagattccattcgtttccatttggtgattgttccattggtgtccattcaatgattaccttccattccattcgatgatgattctattcaattccattcgatgatgattccaat

SEQ ID NO: 6434 - DNA, 152 bp, Protomyxzoa rheumatica
gtgtgcattcatctcacagagttgaacctttcttttgatttagcagttttgaaacctctttttgtagtgtatgaaaatggatattttgagcgcttttaggcctaaggtagataaggaaatatcttcacataaaaactacacagaagcattct

SEQ ID NO: 6435 - DNA, 132 bp, Protomyxzoa rheumatica
tggaaaaggaaatatcttcacataaaaactacacagaaaccctctgagaaacttctttgtgatatgtggattaatctcacagtgttcaacctttattttgattgagcagttttgaaacactgtttttgtaga

SEQ ID NO: 6436 - DNA, 145 bp, Protomyxzoa rheumatica
tgacacgagccagtcataaaagaacaaatactgaatcattccaattatgagatacttagagtaaagaaatactagaaacccaagtaaaagagtggttcctaggagcctgagggggagtaacaaggagcttatttaatgggtatag

SEQ ID NO: 6437 - DNA, 239 bp, Protomyxzoa rheumatica
aatcaaaagaaagattaaactctgtaagatgaacgcacgtatcccaaagaaatttctcagaattcttctgtgtagtttttatgtgaagacgtttcctattccaccataggcctcaaagcgctaaaagtgtccaattgcaggttctacaaaaagagagtttcaaaactgttcaatcaaaacaaaggtttaactctttgatatgaatgcacacatcacaaagaaatttctcagattgcttc

SEQ ID NO: 6438 - DNA, 187 bp, Protomyxzoa rheumatica
tgcaaatattaaaatgagaacagaagaagtcaaaataatattacacaagctacatcttatgtcaaaaactgtcatattttataaaatgtacttgaagtcaaagctccaaagagacaaagaaggacattaaacaacgatagattcattcacctaagacaaatttgtatatgcatgtgtgtgtgtgtgt

SEQ ID NO: 6439 - DNA, 197 bp, Protomyxzoa rheumatica
actccacctcactccatggcattcaattccatcccattccatttcactaaatttcactctattccacttcaatccactcctctctactccactccatgccattcctctccatcccattccattccactgcattccacttgactccactccacttcactgcattccattccacacaattccactccattccattccat

SEQ ID NO: 6440 - DNA, 174 bp, Protomyxzoa rheumatica
ggtggaaaaggaaatattttcaaataaaaactacacagaagcagtctgagaaacttcgtcatgatgtgtgaattcatctcacggagttgaatccttcttttgattgatcagttttgaaacactctttttgtagcatctgcaagtggatatttggagtcctttgaagccttcttt

SEQ ID NO: 6441 - DNA, 160 bp, Protomyxzoa rheumatica
attccacagcactgcttctggggtctacatgtatgtccactacataggattccagaacactgcagctgggttctgagtgtttctccctcacagagaattctagaacactgtgacgagaacctgaatgtttgtctgtaacataggattccagaacactccc

SEQ ID NO: 6442 - DNA, 139 bp, Protomyxzoa rheumatica
gaatgtttgtccctcacacaggattccagaacactgctgctggggtctacatgtatggccgtcacataggattccagatcactgctgctgggttctgtatgtttctccctcacatagaattccagaacactgcgacgag

SEQ ID NO: 6443 - DNA, 133 bp, Protomyxzoa rheumatica
aatggcaggaaatatttgtaaattatatatctgataacggattactatccatatataaagaactcttgcaattcaacaaccaaaaaacaacacaattaaaaaatagacaaaggacttgaatatatatttctcc

SEQ ID NO: 6444 - DNA, 150 bp, Protomyxzoa rheumatica
ccacagcagcagtgttctagaatcctatgtgagggacaacaactaagaacacagcagcagtgttctggaatcctatctgaggaaccaacattcaaaacagagctggagagttctggaatcctctgtgaggtacaatcattcagattctcg

SEQ ID NO: 6445 - DNA, 150 bp, Protomyxzoa rheumatica
tgtgacatcactctgcacggatcacccgggttatgtaactattgtctaggccctgtctattggggcattgtgagttatctctgcactgaccacccaggagatgtgactcttgtcaatgctctgcctagagagacattgggacatatctct

SEQ ID NO: 6446 - DNA, 145 bp, Protomyxzoa rheumatica
ctcgaatggaatgatcaaatggacaagaattgaaacatgaattggaattacattgatttattgaatgggctcgactggaatcattgaatggagttgaaaggaatcattattgaattgaatcaaatggaatcatcgaatggaattg

SEQ ID NO: 6447 - DNA, 161 bp, Protomyxzoa rheumatica
tccaaaatgctcaatccaaagaaaggttcaaatttgtgagatgaacatacacatcacaaagaagtttcccagaatgcgtctatatagtttttacgtgaagatatttccttttctaccataggccacaaagcgctccaaatgtccacttgcagattctacaa

SEQ ID NO: 6448 - DNA, 144 bp, Protomyxzoa rheumatica
caaggctctgcttatagggacattgcgatttttctctgcactgatcacttaggtcatgatactcttgtctaggctctgcctatggtggctttgtgacatatctgtgcactgatcatccttgtgatgtaactcttgtctagtatc

SEQ ID NO: 6449 - DNA, 141 bp, Protomyxzoa rheumatica
gtaggcaaagcataggcaagagttacatcacctttgtcatcatttcagggatatgtcgaaacgcccctgtaggcagagctttgacaaggtttacaccacctagtttatcagcgcagagatatttcacaataacctctgtag

SEQ ID NO: 6450 - DNA, 140 bp, Protomyxzoa rheumatica
gcaagtggacatttggagtgctttgcggcctaaggtagtaaaggaaataacttcacataaaatctgaaacttcacataaaggcaacctgagaaccttctttcggatatgtgcattcatctcacagatttaaacttttctt

SEQ ID NO: 6451 - DNA, 130 bp, Protomyxzoa rheumatica
tcctttgaatgtatcttaggcgatttttgagaatcagtcattataacaatgatgatgaaaatagtgtttctttttaagctgtagctttattcttcttgttttattttttatcaaacagatggttctcact

SEQ ID NO: 6452 - DNA, 124 bp, Protomyxzoa rheumatica
tacaattccaaaacattcctgctgtggtctcaatatctgttcctcccttaggattccagaacaaagctctgaggttctcagtgtttgtctcacacttatgattccagaacgctgctgtgtgggt

SEQ ID NO: 6453 - DNA, 149 bp, Protomyxzoa rheumatica
acagttacaccattcttttaattcatctgtttgaaagcattgtttttacagaacatgcaatgggatattttggagagcattgagtactacggtgaaaaaggaaacatctttagtttaaaactagaaaaaagctttctgagaaactgctt

SEQ ID NO: 6454 - DNA, 146 bp, Protomyxzoa rheumatica
tcagcttacagagtttaacctttcttttgatagagcagttctgaaacagtgtttttgtggtatttgcaagggtatatttagatcgttttgaggcctacggcagaaaaggaaatctcttcacataaaaactagacagaaagcttgtc

SEQ ID NO: 6455 - DNA, 129 bp, Protomyxzoa rheumatica
ctcttgcagattctacaaaaagagtgtttcgaaactgctccatgaaaaagtaagttaaatgctgtgagtttaatgcaaacatcacaaagaagtttcagagaatgcttctgtctaatttttatgtgaaga

SEQ ID NO: 6456 - DNA, 169 bp, Protomyxzoa rheumatica
ggagtggaatggagtggaaaggaatgggaaagtatggaattgaatggaacggagtggggaggagtggagtggaatacaaaggaaaggaatgggaaagaatggaattgaacagagtggagtgggatggagtggagttgagtgcaatggaatggaatggtatgcagtggag

SEQ ID NO: 6457 - DNA, 150 bp, Protomyxzoa rheumatica
ggaatcgtcatcgaatggaatgtagtggaatcatcatcgaatggaattgaatggaacaatcaaagactggaattcaatggaatcattgaatggaatcgaatggaatcaacaaatggaatcgaacagaatagtcatcaaatggaatcaaaa

SEQ ID NO: 6458 - DNA, 277 bp, Protomyxzoa rheumatica
tggcacaatctcagatcacatttcatttcaccattccattccattccattccaatacattccattccattccattcattccattctattccattcccctccattccgttccattccactccactccactccattttattccattctactccattccattccattcctttatttcgaatggatctcactctgtcacacagactggaatgcggtggtggcacaatcttagctcacatttaatttctccattccattccaatccattccataccattcca

SEQ ID NO: 6459 - DNA, 312 bp, Protomyxzoa rheumatica
aatatcttcacataaaaactagacacaagaattctgacaaacttctttgtgatttctttattcatctcagagaggtgacccttacttttgattgagcagatttgaaacactttttttgtagaatctggaagtggacatttggggcgctttgaggcctatggtggaaacggaaatatcttcacataaaaaccaggcagaagcattctgacaaacttctttgtgatgtgtacattcacctcaccgagttgaacatttcttttgattcggcagctttgaaacactcttttttttgaatctgcaagtggacctttg

SEQ ID NO: 6460 - DNA, 134 bp, Protomyxzoa rheumatica
agtttttatgctttcatctcaataactattatgggaaaaataatttctaggggagatttgttgaaatgttaacaatgcattattatgttggccctcctatgtttgtgtatatgggcattgcatacataggagaa

SEQ ID NO: 6461 - DNA, 189 bp, Protomyxzoa rheumatica
agtgtttcaaaactgctatatcaaaagaaaggttaaacactgtgagtggaacccaaacattacaaagtagtttctgggaatgattctctctagtttttaaatgaaggtatttccttttctaccataggattcaaagagctctaaatatccacatggaaattctagaaaaagtgtgtttcaaatctgctc

SEQ ID NO: 6462 - DNA, 130 bp, Protomyxzoa rheumatica
tagtgggattaaaatattcagtaaaccatgctgttaacagatgtgttgtcactcagactgtgatgttccatttctaggccacagaaagaatagatttgcataattcttaagggccctgagattttcagag

SEQ ID NO: 6463 - DNA, 126 bp, Protomyxzoa rheumatica
cacgaaagccccctgtgggagagccccaggcgcgcaggctgtgtggggtgtgggaagccccgttccccacgcctgggtgtgggtgaactctagtgagggaggagtgtgacatcccccgggggtgtt

SEQ ID NO: 6464 - DNA, 124 bp, Protomyxzoa rheumatica
tcacttggttgatcagttcagagatgtgtcacaatgtccaggaatacaaatctaagacaagagtccatcacctgagtgatcagtacagagatatttaccaatgtcccctatatgcagtgcctag

SEQ ID NO: 6465 - DNA, 384 bp, Protomyxzoa rheumatica
attccattccattccattccattccactcaactgctttccactctactccactccaatccagtctactccactccactccatgatattccattccatcccatttctttccactccattccactctactccacttcaatccactccactgcactccatgacattccattccatcccattccattccactccattccagttgactccactgcactccacaccactccactccacttcactccattctattatactctattcctttccattactttctttccacaggatctcactctgtcacaaagcatggagtgcagtggcacaatctcagctcacttttcatttcaccgttccattgcattcctttccattccattccattccat

SEQ ID NO: 6466 - DNA, 130 bp, Protomyxzoa rheumatica
agaaacttgatcctcatgtgtgtactcaactaatagagttgaacctttctcttgatagagcagattccaaacacgctttttgtggaatctgcaagtggatagttgcattgctttgaggatttcgttggaa

SEQ ID NO: 6467 - DNA, 142 bp, Protomyxzoa rheumatica
tcacataggattccagaacactgctgctaggttgagtgtctgtccctcacatgggcttctagaacactgttatgagggtctgaatgtttgtccctcacacaggattcctgaacactcctactgtggtctgaatgcttgttcc

SEQ ID NO: 6468 - DNA, 165 bp, Protomyxzoa rheumatica
tatctctgcactgatcacccaggtgattcaactcttgtcttggatctgcctacaggtggtattgagaaatatctccacactgattaactaggtgatttaacacttgtctaggctttgcctacaggggcgttttcaaatatccctgaactaatgacaaaggtgatg

SEQ ID NO: 6469 - DNA, 182 bp, Protomyxzoa rheumatica
tgaggcctcttttgaaaaatgatatatcttcacataaaaactagacagaagcattctgaggaacttccttgtgatgtgtatattcagctaaaagagttgaacctctcttctgatggagcaggtttgaaacattctttctgtaaaatctgcaagtgttcatttggagcgctttgaggcctctg

SEQ ID NO: 6470 - DNA, 194 bp, Protomyxzoa rheumatica
atgaaatgtaatggaattgaatggaatggaatctaatggcatcgaatgagatcaaatggaatatgttgaagaggagaggattggaatggaatggaatggaatgtggggaaatggaaaaaaatggggtggagtggagtggagttgaatggggtggaatggaatggaattggaaggattggaatggaacggagttt

SEQ ID NO: 6471 - DNA, 408 bp, Protomyxzoa rheumatica
tggaatggaaaagacttgaatgtgatgtactgtagtggaatggactcgaatggaatggaattgaatggaatccaatggaatggaatagtatggaatcgaatggactcgaatggaatggaatcgaatagaatattattgagtggaatgggatcaaatggaatggaatcaaatagaatggaatggactgcaatggtatggaatggaatcgaatgtaacaaacagcaatgcaatagaatcgaatggaagggaataggacggagtggaatcaaaaggaatgtaaccgaatcaaatggacatgaatagaatggacgggaatgcaactttgtcgaatagaatggaatcgaatggaatgtaatcgaatggtacgaaatgggatgggatggaatggaatggaatggaatggaatgg

SEQ ID NO: 6472 - DNA, 149 bp, Protomyxzoa rheumatica
ggcagagagtggacaagagttacataacctaggtgatctgcgtagagatacgtcacagccacccctgtaggtggagcctagacaagagtaacatcacctgggtgatcagtgcagagatacatcacaatacccactataagtggagccta

SEQ ID NO: 6473 - DNA, 216 bp, Protomyxzoa rheumatica
gggaggtcgaggtgggtggatcacttgaagtcaggagtttgacaccagtctaatcaatatggtgaaaccccgtctctaccaaaaatataaaaattaactgggcatggtgacatgagcctgtagtcccagctactcgggaagctgagacaagagaattgtttgaacctgggaggcggaggttacagtaagactagatggtgccactgcactccagtc

SEQ ID NO: 6474 - DNA, 124 bp, Protomyxzoa rheumatica
aggcctcaaagcgctccaaataacgaattgcagattctacaaatgagcttttcaaaactgctcaatcaaaagaaagttcaactctctaagatgaatgcacacatcacaaagaattttctcagaa

SEQ ID NO: 6475 - DNA, 129 bp, Protomyxzoa rheumatica
ccattcgatgattccatttgactgaattcgatgattccaatcgatttcatctgagtattggagtccatttggtgattcctttagattccactcaaagatgattgcattcaattccattccatgatacta

SEQ ID NO: 6476 - DNA, 217 bp, Protomyxzoa rheumatica
tgaaccgttcttttgattgagcggttttgaaaaagtttttgtaggatctacacagggatttttctgttccctttgatgcctatggtgaaaaacgacatatcttcacatgaaaactagacagaagctttcagagaaacttctttgtgatgtgtccattcatctcactgggttgaacctttcttttgattgagcaatttggaaacagtcttcttgtaga

SEQ ID NO: 6477 - DNA, 142 bp, Protomyxzoa rheumatica
agaagttactgtgaatacttccatcttgtttttatgtgaagatattcctggttccaatgaaggcctcaaagcattccaaatatccacttgcagattctacgagaagagtgtttcataactgctgtatgaacaggtaagttca

SEQ ID NO: 6478 - DNA, 300 bp, Protomyxzoa rheumatica
atccacttgcagattccacagaaagagagactcaaaactgctccatcaaaagatagattcaaccctgtgagttgaatgcccagatcacagagaaatttctcagaatgcttctgtgtagtttttatgtaaagatatttccttttccacaatagtccccaaagcgttccaaatatccacttgcagattctataaaaaaaagtttccaaactgctcaatcaaaagaaaggttcaagtctgtgagatgaatgaacccttcacagagaagtttctcagaatgcttctgtgtagtttttttgtgaa

SEQ ID NO: 6479 - DNA, 124 bp, Protomyxzoa rheumatica
ttcctcccacccacacctgtgcctcatggtaaacggatagctggcattacttgcactcaaatctttgtcttagggtatgcttttggcaaaccaaacctaaaacataatcgttctcttgcacatg

SEQ ID NO: 6480 - DNA, 168 bp, Protomyxzoa rheumatica
tttgtctggggatattcagtttttctttgtaagcttcaataagctcccaaatgtttctttgcaggtcctccaaaaagagagtttccaacccactgaatcaaaagaaagttttaaccctgagagatgaatctacactttacaaagcagtttcacagatagcttctttct

SEQ ID NO: 6481 - DNA, 616 bp, Protomyxzoa rheumatica
gagtggagtggaatggaaaggaatggagtggaaatgaatggaatggagtggaatggattggagtggagtggaatggattggagtggaatgaagtgttgtggaatggagtggaatggagtggaatggacgggaatggaattgaatggaatgggatgaagtgcattggaatgtaatggagtggagtgtagtgggttggagtgcgttggagtggaatggagggcagtagagtgaaatggagtgcagtggaaaggagggtagtggaaaggattggagtggaatggaacagaatagaacaaaatggaacggaatggaatagagcggagtggagtggagttgagtggagtggatcagaatgcattggaatggaatggaatgaaatggaatggagtggagtgtagagtcgtgtagtggagaggagtggagtggaatggagtggagtgaagtggagtggaatgcaatggaatggaatagaatgaaatggaatggaatggtgaaatgaaatgtgaactgattgtgccactgcactccagtatgtgtgacagagtgagatccagtcaaaataaaggaatggaaggaaatggagtagaatggaatggaatggagtggagtggaatgg

SEQ ID NO: 6482 - DNA, 159 bp, Protomyxzoa rheumatica
gagaagcttgcagcagaacagcagagtgagcaatagctatcattattctctctacctggcagggcttcttgcctcttacataaaacagagattactgaggttgcaaaagactctgaaatctggctaggtgtagtggttcatgcctataatctcagcact

SEQ ID NO: 6483 - DNA, 125 bp, Protomyxzoa rheumatica
cacacatcagaaagtagtttctcaaaaagcatctttgtagtctttatccaaagtcatttgctttttcaagataggcctcttgtgctctcaagaatcccttcacagtttgtacaaaaacagtgttt

SEQ ID NO: 6484 - DNA, 235 bp, Protomyxzoa rheumatica
tgctgttgcagtccctgctgtctggcttctgtagctttagattgattcttaaattcagctactatcgattcttcaactttgttcttttcaatgttgctttggatattcttggtcctttacatttccctatcattttagaatcagtttgtcaatttctatggaaaaattctggtaagattatcattggaattgtataccaattccaatggtatacaattgtaagatcagtttatgg

SEQ ID NO: 6485 - DNA, 192 bp, Protomyxzoa rheumatica
tcaaatggaattgaatcgaatggaattgaaaggcatcgaatggaatcaaatggaatgcggtgaagtggagaggagtagatttgaatggagtgaaatggaatggggtggaatggaattcaatgaagtggagtagagtggagtggaatggaaactaatgacatggcatggaagggaattgaatggaattgtatt

SEQ ID NO: 6486 - DNA, 132 bp, Protomyxzoa rheumatica
ccattgcattccattccattcaatgccattgcattcgattctattcctttcgactccattcctttcagttccattcaatctgattccattccattctaatcctttccactgcattccattccattcttttcc

SEQ ID NO: 6487 - DNA, 124 bp, Protomyxzoa rheumatica
acaccgagaatcttgaagtcagcaagaaaaaatgacttagcatgtacaatgttacccctataggatgaccagcagatgtctcagccaatagcatgcaggcaagaggttgtaggatgacatactc

SEQ ID NO: 6488 - DNA, 183 bp, Protomyxzoa rheumatica
tccagaacactgctgttgggttctgagtgttttgtgcctcacatacgattctagaacacttctacattggtctaaatgctcgtccctcacatagggctccagaaaactactatgagggtctgaatatttgtccctcacctaagactccataacactgctaagagagtctgaatgtttgtcccg

SEQ ID NO: 6489 - DNA, 136 bp, Protomyxzoa rheumatica
taaatatcttcatataaaaactagaaagaagctctctgataaacttctatgtgatgtatgcattcatcccccagagttaaaccttacttttgatccagcagtttggtaaccctgtttttgtagattctgtgaaggg

SEQ ID NO: 6490 - DNA, 136 bp, Protomyxzoa rheumatica
atggtctcgaaaggattgggaaggaatagagtggaatggactcgaatggagtggaatagaaagaatttgaatggaatggactgggatcgaatggagtgaaatggggtagaaaggagtggaatggatttgagtggag

SEQ ID NO: 6491 - DNA, 206 bp, Protomyxzoa rheumatica
aaggaatggaatcaaatggaatggaaaggaatggaatggagtggaatggactcgaatggagtagaatggagtacaacggaatcaaatggaatggagtggattcgaatggaaaggaatcaaatgacatagaatggaattgaatgcaaggaatcaaatggaacacaatcaaatggaatggaaccgaaaggaatggaatcaaatggtat

SEQ ID NO: 6492 - DNA, 177 bp, Protomyxzoa rheumatica
taggccacaaagcgctccaaatgttcactggcagatgctacaaaaagagtgtttccaaactactcaatcaaaagacattttgaactctgtgagaaaatggacacgtcacaaagtggattctcagaattcttctgtgtagttttctgtgaggaaattttcttttccaccataggcctc

SEQ ID NO: 6493 - DNA, 134 bp, Protomyxzoa rheumatica
gttctttccattccattccgttccattcatgtccattccattccattcgacttcattccattccaatacttttgattccattccattctgttaattcaactccattcaaatccattccattccataccatacca

SEQ ID NO: 6494 - DNA, 142 bp, Protomyxzoa rheumatica
tattcagtttttccccataggcctgtttgagtacccaaatttccattcacagattctacaaacagattgttttaaacctgctgaatcaaaaaaaagtttgaactctctgggatgaatccacacattgaaaagctgtttcaca

SEQ ID NO: 6495 - DNA, 153 bp, Protomyxzoa rheumatica
gagcccagcaggtttggtgcaggaatatctgcaggtgagaattaaaaaacaatcaggtactatgcctattacctgggtgaggaaataatctgcacaccaaacccccgtgacttgcaatttacctatatgacaaataggcacgtggacccctga

SEQ ID NO: 6496 - DNA, 144 bp, Protomyxzoa rheumatica
cttgaagttcatatggaaccaaaaagagcccgcatagtcaagacaatcctaagcaaaaagaacaaagttggaggaatcgcgctacctgacttcaatctataatacaaggctacagcaaggaaagcagcatggtactggtaccaa

SEQ ID NO: 6497 - DNA, 140 bp, Protomyxzoa rheumatica
aaaaatctaatctctcgagataaaagctagaatgaaggtatccatgaaactgatttttgatctggggatccctgttacagagataaaactttcttttgattcagcaggtggaacactctttttagacaatctgcaaaggg

SEQ ID NO: 6498 - DNA, 147 bp, Protomyxzoa rheumatica
gaatggaatataatggaatggaatggaatggaatgcaattgaatggaatagaatggaatggaatagaatgcattggaatgctatagaattgagtggaattaactggaatgaaatggaatggaatggattcaacacgaatggaatgga

SEQ ID NO: 6499 - DNA, 171 bp, Protomyxzoa rheumatica
gaatggaatggaatggaatggaaaggaatagaatgaaatggaatcggttggaacggaatggaatggaatggagcagaatggaatagaatcgattgcaaggtcatcgaatggactggaatggaatgaactcgaattgaatggactggaaaaaaatggaatcaaatggattgg

SEQ ID NO: 6500 - DNA, 187 bp, Protomyxzoa rheumatica
atgagctcccttaagtccatttgaaaaattgacaaaaacagtgtttccaaactgctgaatgaaaagaaagatttaagtctgtgagatgaatggaagcacccaaactgttttctcagatagcttcctctaagtttttatcctgggacattccctttttcactattggcttgaaagagcagcaaaatgt

SEQ ID NO: 6501 - DNA, 123 bp, Protomyxzoa rheumatica
taaaaactatgcaaaagcattctgagaaagttctgtgtgatgtgtgcattcatcttatggagttgaacctatcctttgattgagcagttttgaatctctctgtttctagaatctgcaagtgga

SEQ ID NO: 6502 - DNA, 124 bp, Protomyxzoa rheumatica
gatgaagtcacacatgacaaataagtttcttagaaaatatctgtctagcttttatgtgaaggtattttctctttccccagaagcctcaatgggctaacaaacatccatttgcagattctacaaa

SEQ ID NO: 6503 - DNA, 189 bp, Protomyxzoa rheumatica
ccagaacacagctgctgggttctgaggttttctccctcacataggattccagaacactccggctctggtctgaatgtttgtccccagataagattccagaacactgctgctgggttctgagggtttctctcacatgggactgcagaacccttctgctgtggtctgaatgtttgttcctcacataggatt

SEQ ID NO: 6504 - DNA, 227 bp, Protomyxzoa rheumatica
gacagagtagttttgaaactctcttttggtagaatctgtacgtggatatttggggcgctttgcagcctatggtagaaaacggaataccctcacataaaatatagacagaagcaatctgagaaattcctttacgatgtgtgcatttatctcacagagttaaaactttctcttgattgagccattttgaaactctcctttcgtagaatctggaagtggacatttggagc

SEQ ID NO: 6505 - DNA, 199 bp, Protomyxzoa rheumatica
aatgggatggaatggcatggaatgtaattgtcccaaatgtaatggatctaaatggaatgtaatcaaatagaatggtctcgaaatgaatggtctcaaaaggaattaattcaaattgaatcaaatggactggaataaaatagtttggaatgtaatcaaatggaatggaatcgaatggattggactggaaattgatggactg

SEQ ID NO: 6506 - DNA, 180 bp, Protomyxzoa rheumatica
cacataggattccatgacactgctacgaggatctgattgtttgtccagcacataggactccagatctctcgttctctgttctgaatgtattttcctcacatagattccagaacaatgctacgagggtctgaatgtttgtctcacacataggattccaaagcaccacagctgtggtctgta

SEQ ID NO: 6507 - DNA, 142 bp, Protomyxzoa rheumatica
aaagagagtttcaaaactgctcaatcaaaagataggttcaactcggtgagttgtatgcacacattccaaagaagtttctctgaatgcttctgcatagtttttatgtgaagatatatccatttccaacatagtccacaaagtg

SEQ ID NO: 6508 - DNA, 151 bp, Protomyxzoa rheumatica
catcagaaaacaggtactcataacacttcttttcagtttttatcagaagatatttccgtattcaccataggcctttttgcactacataatatcactttgcatattacacaaaagcagtgcttccaaccagctcaattaaaagatacattta

SEQ ID NO: 6509 - DNA, 128 bp, Protomyxzoa rheumatica
tgatgattacattggattccattctatgattccattcaattccattcgttcatgattccattcgattccactcgacgatgattccatgcgatttcattcaatgattctattcaattcctttcgatgat

SEQ ID NO: 6510 - DNA, 200 bp, Protomyxzoa rheumatica
ccattccattctattcctttccattccattccattccattcgtttacaatccatttgagcccattcaactccagtgcctttcatttgagtccattccattgcattccattccattccactccattccattccattccaattgattcgattcccttccactcaattccactccattcctttccattgcattccattctatt

SEQ ID NO: 6511 - DNA, 187 bp, Protomyxzoa rheumatica
atggaatcatcatcgaatggaatagaatggaaacatcattgaattgaatcaaataaaatcctgatggaatttaatcaaatggctcatcatcgaatggaatcatggaatgaaagcaaatggaatcatcatagagtggaatcgaatggaatcatcgtatgggattgaatggaatcatctttgaatggaa

SEQ ID NO: 6512 - DNA, 187 bp, Protomyxzoa rheumatica
ccactccacaaaactccactctaccccactccactgcattcctttctattacatcccattcccttcctcttctttccactatactccactacactccactctactccaccccactccaccccactccattccattctactctaatccgttccattcctttctttcgataggatatcacctgtcaccc

SEQ ID NO: 6513 - DNA, 133 bp, Protomyxzoa rheumatica
ctctttttgtagaatctgcaattggacgtttggagggctttgcggcctatggtagaaaagggaaaatcttcacagaaaatctagcagaagcaatctgagaaactccttggagatgtgtgcattcatcccacag

SEQ ID NO: 6514 - DNA, 161 bp, Protomyxzoa rheumatica
tgcattcatctcacagagttaaacctttgtttgattcagcagttttaaaacaattttttcgtccattctccgaatggacatttggtagataatggaggccaaaggcaaaaaaacgaatatcccattgcaaaaactatcaagaagctctctaagaaactgct

SEQ ID NO: 6515 - DNA, 130 bp, Protomyxzoa rheumatica
aggtgatgtaaatcctgtccagcctctgcctacaggggcattttaacatataactgcactgataacccagatgatgtaactcttgtgtaggcttccctaacagggggcattgagacatatctctgcactg

SEQ ID NO: 6516 - DNA, 131 bp, Protomyxzoa rheumatica
aaaagagttacatcacctgggtgatcagtgcagatatatgacccaatgcccacatacacagagcctagacaagacttcaatcacctggttgatcagtacagagatatgtcacaaatccccctctaggcaga

SEQ ID NO: 6517 - DNA, 146 bp, Protomyxzoa rheumatica
tagacagaagcattctcagaaacttccttgtgacgtgtgcattaaataacagtgttgaaccattgtttagaagagcattttggaaacacttcttttttttagaaaatgcaagtggatatttggagcgctttgtggcctatggtgga

SEQ ID NO: 6518 - DNA, 133 bp, Protomyxzoa rheumatica
ggattcatctgacatagttaaaactttcttttgattcagcagggttggaaacactctaactggggaatctgtgaagagacatttgggagctctttgatgcctatagggataaactgaatacccaaggaaaaaa

SEQ ID NO: 6519 - DNA, 134 bp, Protomyxzoa rheumatica
ctatattgcaaaattaaatatcttcacataaaaactacacaatagaattctgagcaacttctttgtgatgtgtgcattgaactcacagaattcaacctattttttgattgagcactttcgaacctctcttattg

SEQ ID NO: 6520 - DNA, 127 bp, Protomyxzoa rheumatica
ggaaaccctctttttgtagaattggcaagtggacatttgagtgctttgaggcctatggtggaaaaagaaagatcttcaattaaaaattagacagaagcattctgagagatttctttgggatgtgtgc

SEQ ID NO: 6521 - DNA, 202 bp, Protomyxzoa rheumatica
agcagatccagctcagccaccacagtttgagccaaaacctcccaagcaacacatgctcatgagtgagaaatggtggcctatggtcgtaggcctctgaggtgtgggattacttgttacaaagctagagttaattaatagagatttctacctcacatccctacaaatcaaataacaaaggaaataaaacaaaatatgaaaagca

SEQ ID NO: 6522 - DNA, 134 bp, Protomyxzoa rheumatica
acaaaagaattctcagcatcttctttgtgatgtgtgcattcaactcacattgttgaaccttcctttcaatagagcagttttgaaatattatttttgtaggatttccacgtggatatttagagcggtttgaggcc

SEQ ID NO: 6523 - DNA, 151 bp, Protomyxzoa rheumatica
gaaatgcatcacgaagacattttgtaaaagaaaactcactatcatgatgtaaacttgtatacttatcatgtgctcacgtgagcgcatgtgcgtgcctgtctgaatgttttctgagaactgataatcttttccctagggacgatggttgaag

SEQ ID NO: 6524 - DNA, 239 bp, Protomyxzoa rheumatica
ctattgaatggaatggaatggaacggaatggaatggaatgtaacggaacggagtggagcagagtggagtggagtggtgttgaatgaaatggatcggattgctgtggaatggaatggaatggagtgtagtggaatggagaggagtgtagtgtagtggactggagtggaatgtaaaggaatggaatggaatggtgaaatgaaatgtgatctaaaattgtgccactgcactccagtctgggt

SEQ ID NO: 6525 - DNA, 145 bp, Protomyxzoa rheumatica
catcatcgtatggaatcaaatggaattatctaatgaaatcgaatgtaatcatctttgaatggaatcaaatggaaatatcatcgaacggaatcgaaagaatcaacaacaaatggagtcgaaaggaatagtcatcaaatggaaacga

SEQ ID NO: 6526 - DNA, 263 bp, Protomyxzoa rheumatica
ggcctcaaaacgctcagaaatatccctttgcagattccacaaaatgactgtttccaaacagctcaatcaaaagaaaggttcaacactgagatgaatgcacacataagagagaagtttctctgaaagcttctgtctagtttttatgtgaacatatttccttttccaccttaagcctcaaagcgctcccaatgtcaattttcagatttcacaaaaagattatttcaaaactggtccatcaaaagaaatgttgaactctgggagat

SEQ ID NO: 6527 - DNA, 139 bp, Protomyxzoa rheumatica
caaactacaatttacctgttattctgcaggccctcccccacccaccactgtccctcaccctcctgtcatttcagtccctcaactggtcaccttgccatccactcaacctgcttctctgtacacttcttcatgcatggtt

SEQ ID NO: 6528 - DNA, 145 bp, Protomyxzoa rheumatica
taaaaaggtaagattgagtggtgcatattgatgcacttgttccccttaagcgttaggaggttccagcgcaacaggataagcccatgtctctaatccacttgtttctttgttttggcataataggtgttgtatggaagtttcaaga

SEQ ID NO: 6529 - DNA, 134 bp, Protomyxzoa rheumatica
caatggaatgcaatcgaatggaatgcaatggaattgactcaaattcaattgaacggagaggtcacaaaaggaaatggtggaatggaacggacgggaattgaatgcataggaatcaattgggctgaaatggaatg

SEQ ID NO: 6530 - DNA, 132 bp, Protomyxzoa rheumatica
atgattccatttgattgcattcattgaagatttcaatcgagaccattcatagtttccactcgataccatttgatagtgattccattctagtccattcgatgattgcattccattccattcgatgatgattcc

SEQ ID NO: 6531 - DNA, 136 bp, Protomyxzoa rheumatica
ctccacgaaattctccctccccccctccccgccccttttgggatgcaaccatttgacataacatatattctctgcataagtccgttctctcattgctataaaaaactacctcggactgggtaatttataaagaaaa

SEQ ID NO: 6532 - DNA, 160 bp, Protomyxzoa rheumatica
attttatgtgaagatgaccccttttctaccatagatctcaaagtgctcccaatgaacctttgcagattcaagaaaaatattatttgaaaaatactctttctaaagaagtgttcaactctctgagttgaattcacacatcacaaagcagtttctgagaatg

SEQ ID NO: 6533 - DNA, 131 bp, Protomyxzoa rheumatica
tccaatctatttccctccactccactaccctccattaaataccattccaccccattccattccactccattttaatccaccctactccacttcattgcattccatttgattgcattgaatgcctttagatt

SEQ ID NO: 6534 - DNA, 196 bp, Protomyxzoa rheumatica
tgaatctctctttttgtacaatctgcaagtggatatttgtaaacctttccaccctattttggaaagggaaactacacggaagcattctgagaaacttctttgtgatgtatgcattcctctcacatagttgaatctttctttgattgagcagtatggaaacaatcttttggaagaatctgcaagtggatatttgaga

SEQ ID NO: 6535 - DNA, 123 bp, Protomyxzoa rheumatica
atagaacagttttgaaacactctttttgtggaatttgaaagtttatatttagagagctttgaggccaactgtagaaaaggatttatcttcacataaaaattagacagaagcattgtcagaaac

SEQ ID NO: 6536 - DNA, 171 bp, Protomyxzoa rheumatica
ggccacaaagcgctgtaaatgtccacttgcagattgcacaaaaagagtgtttccaaactgctgaatgaaaagaaaggttcaacactgtgagatgaatgcaagcagcacaaagaagtttctccagattcttctttctagttttcatatgaaaatatttccttttccaccata

SEQ ID NO: 6537 - DNA, 197 bp, Protomyxzoa rheumatica
gaaaaggaatcttcttcacattaaaacgagacagaagcattctgagaaatttttctgtgatgggtgcattcatttcacagagttgaacccttcctgtgattgaatggtttggaaacatttgttttgtataatctgcagaaggatatttttgagctgattgaggcctatggggcgataggaaatatgttcacataaaa

SEQ ID NO: 6538 - DNA, 124 bp, Protomyxzoa rheumatica
attgaatggactcgaatgaaatcatcatcgaatataattgaaagcagtcatcaaatggattcaaatagaataatcaaatggctccaatgcaatcagcatcaaatggaatcacatggaaacactg

SEQ ID NO: 6539 - DNA, 132 bp, Protomyxzoa rheumatica
agaagtttctcagattgcttccgtgtagattttaattgaagattattctttttctaccattgactgcaaagcatacaaattttccacttgcagattcgccaaaagagtgtttccaaacttctcaatcaaaag

SEQ ID NO: 6540 - DNA, 131 bp, Protomyxzoa rheumatica
cgatgccaattgaagattattccgttcaattccattccattctaccatttgataccattcattgatgattccattagaatgcattcgatgacaccattcggttccatttgatgataattccattccattcc

SEQ ID NO: 6541 - DNA, 148 bp, Protomyxzoa rheumatica
aattaacaagactatcagaagaaattttctaaaatgtacacactaagtacatcacatttttctaataatcactttgatagagcaacttaaaatctttggtttcaaaacaccaggaagattatgtaagagaaaaccaccacataataca

SEQ ID NO: 6542 - DNA, 131 bp, Protomyxzoa rheumatica
ttcattgagcacttttgaatctgtccttttgtaggatctgcaagtgtatatttggcgacctctgtggcctatggtggaaaaggaaataccttccaaaaaaaaaaaatacatagaagcattctgagaaaatt

SEQ ID NO: 6543 - DNA, 131 bp, Protomyxzoa rheumatica
gagtcaatccgagtgcaatgtaatggaatggaatcaacacgggtggaatgaaatggaatggtacggaatcaatagaaatgcattggaacgtaattaaacgcaatggaatcaacacgagtggaatggaatgg

SEQ ID NO: 6544 - DNA, 144 bp, Protomyxzoa rheumatica
atcgatagtgagtcatgtaatatacttgtgctgaggtcttttgatgaactaaattggtaacgaagcctcttagcaactggagaaatacaggtaacattcaggggagtaacacgaagattcctaacactattattattcctataa

SEQ ID NO: 6545 - DNA, 133 bp, Protomyxzoa rheumatica
gtcagaaagtttgtccctcacataggattccagatcactgctacgaggttctgaatatttgtccattacataggactccagaacactgctgccgtggtctgaatgtttgtccctcacataggattccagaaca

SEQ ID NO: 6546 - DNA, 188 bp, Protomyxzoa rheumatica
tccattccagtccattacgttcgatttcatttcattcagttccattctattccattccattccatttcatttgacagctttccattagaggtcatttcattccagtccattacattcaattccattccatgccatttcgttgcattccaatgcattcccttcctttcatatccattctattccattcc

SEQ ID NO: 6547 - DNA, 167 bp, Protomyxzoa rheumatica
gaaggcaatagaatggaattgaacagaaaggaaagaaatggaatggaacagattgaatgcgagtggaattgaatggaatggaatggattgaaatggaatgcaatgcattggaatctaattgagtggaatcaacacgaatggaatgcaacggaaaggaatggaatgga

SEQ ID NO: 6548 - DNA, 163 bp, Protomyxzoa rheumatica
gatatttggaagtccttaaaggcctgaaaaaggaaatatctttccataaaaactagacagaagctttggagaaactactttgtgatgagtgcattcatttcatggagctgaatctttcttttgtttgagcagtttggaaacagtctttttctagaatctgcaa

SEQ ID NO: 6549 - DNA, 215 bp, Protomyxzoa rheumatica
tgtatggcttttctctccagtagtactactcctgtgtgaagtagagtttggagcaggggcagaggtttttccactttgatgattcttattcttactctctacagtacaggactgcatctgcgcagtgtggattgagttatttgcaaagatgttttcactttgagtaaaattatatgttttctccctaacatgagttatgagggccctaaggcata

SEQ ID NO: 6550 - DNA, 136 bp, Protomyxzoa rheumatica
gaagttttcaaatactcttttgtagaatttccaagtggatatttagagcggtacgaggcatatggtagaaaaggaaatatcttcattaaaaaattagacagaatcattctgagaaactgctttgtgatatgtgcat

SEQ ID NO: 6551 - DNA, 164 bp, Protomyxzoa rheumatica
tggactcgaaggaaagggaatgaaatttaacagaatggactttaatgaaatggaatcgatgggaatggaatggaattgactcgaaagtaatggaatgcaatggaatggactcaaatggaatggaaagggattgactcaaacggaattgagtgaaatggacttga

SEQ ID NO: 6552 - DNA, 126 bp, Protomyxzoa rheumatica
aaacccagaagggcagttattcaattgtaaggctctaaaataattatttttcaccctgtgttccatttccagggcacgccaatgccttgggaagattctaccttgtgactttgcatggttcagccc

SEQ ID NO: 6553 - DNA, 138 bp, Protomyxzoa rheumatica
agagggtgcaagccataaccttggtagcttccatgtggtgttaggcctgtgggtttcccaaatgcaagtagttgagacttgggagcctccacctttatttcaaatgatgtatgaaaaagccagggtatgcaggcagaa

SEQ ID NO: 6554 - DNA, 128 bp, Protomyxzoa rheumatica
actgatcacccaggtgatgtaactcttgtctaggttctgcttacaggaagtattgtgacatatctcagcattgatcacctaagtgaagtaacactcgtgtaggctctgcctacaggggcattttgaca

SEQ ID NO: 6555 - DNA, 144 bp, Protomyxzoa rheumatica
tccttatatccaattgcagattccacaaaaagagcttttcgaaactgatctatcaatagaaaggttcaactctgttaggtgagtacatatatcgccaagaagtttcttagaatgcttctgtctagtttttatggaagatatttc

SEQ ID NO: 6556 - DNA, 122 bp, Protomyxzoa rheumatica
tatcagaatggctaaaataaaaaaaaaataataaatgctattgataatgtgaggaaaccagatcatttatacattgctggtaagaatgtaagttggaaaaatagtttggcagttttcttaaa

SEQ ID NO: 6557 - DNA, 142 bp, Protomyxzoa rheumatica
ctgagccttttcattcctttcatcttcacgtccttcacatccacccctttgctttacccatgcttgacacttcccacctcaatggccaccgctgcaaaaatgaactaaccacctttcactctaaatttgctctcattctgat

SEQ ID NO: 6558 - DNA, 125 bp, Protomyxzoa rheumatica
gaagtttctcagaaagcttctgtctagtttttatgtgaaggtatttcctatttcaccatgggccatatagcgctcacaaatatttttttgcaaattctacaaaaagactgtttccaaactgctca

SEQ ID NO: 6559 - DNA, 142 bp, Protomyxzoa rheumatica
cgattccatttgatgattccatttgattccattcaataatgattccattcgggtaaactcgatgattccatttgaggatattcgttaagtccatttgagtccattctatactgattccattcgagtccattcaataattcca

SEQ ID NO: 6560 - DNA, 257 bp, Protomyxzoa rheumatica
gccttaaatcttctgttttcacatacaaagtaaaatatacctatatattttataaaatagataaatctggactagcaaattgttacctataaaatagataatttatactaggctaacaaaatgtcaaaatatgtagcaaaaatgtcacaagatgtctcaaaataatgagtaggtgtcacttaactgttgtcaaataacagaaaaacatataacatgaaataataagtgtttgtttaaacacatgaatatgttttggg

SEQ ID NO: 6561 - DNA, 161 bp, Protomyxzoa rheumatica
tatggtttaaatctgtgagatgaatgcatacatttcaaaaaggtttcacagatagcttcctttttgtttttatcttgaggtatatgctctttcatcattggcttcaattagctcccaaatgtccaatcacagattgtacaaaaacagtgtttccaaactgc

SEQ ID NO: 6562 - DNA, 189 bp, Protomyxzoa rheumatica
tcctgctatggtctgaatgtttgcccctcacatagcattccagaacactgctgctgtggactgaatatttgtccctcacaaaggattccagagcagtgctcctggattctgagttttttttccctcacataggattctagaacacccctacgaggatacgaatgcttttccctcacatagggttccaga

SEQ ID NO: 6563 - DNA, 185 bp, Protomyxzoa rheumatica
cagtggaggggagtagagtggaagggattaggaatggaatggaatgggaagaaaatgaattgaacagggtggagtggagtagataggaatggagtggagtagaatcgaatggaatggaatgaaatggaaagcaaaggaactgagtcgagtcaagtggattggaatggaatggagtggagttgaat

SEQ ID NO: 6564 - DNA, 141 bp, Protomyxzoa rheumatica
aaaaactgcacagaatcattctgagaaacttctgtgcgatatgtgcattcatctcacagttttgaacctttcttttcactcagcagttttgaaactttatttttgtggaatctgcaagtggatatttggagcgcttcgagg

SEQ ID NO: 6565 - DNA, 141 bp, Protomyxzoa rheumatica
atttatcgcagattaagtcacatgaattaaaaagcatttaggttaatttttgtatatttcataaggtcatttatctaaatagactttcttaagggatttctggctcactacaccagattttaccatgtaggcaaaacatat

SEQ ID NO: 6566 - DNA, 262 bp, Protomyxzoa rheumatica
cagcttctgcaaaaagagtatttccaaactgctcaatgaaaagaaaggttcacctcggtgagatgaatgctcacatcacaaagaagtttcccagaattcttctatatggtatttatttgaagatatttccttctccaccataggccttaaggcgctcaaaatgtcctcttgtagattcttcaaaaagagtgtttgaaaactggtccttcaaaataaaggttaaactatgagagatgaatgcacacatcaaaaataagtttct

SEQ ID NO: 6567 - DNA, 232 bp, Protomyxzoa rheumatica
ctttttcaccatagaactcaaagcactcaaaaaatccatttggagattctacaagaacacatattccaatctgctcaatgaacagaaacttttacctctgtgagatgaaagcgcatttcacaaagctgtttctcagaaaacttctgtctagtttttatgggaagatatttcctttttacgattggcctcacagcactcacaaaatccctttgcaaattctccaaaagagtgt

SEQ ID NO: 6568 - DNA, 138 bp, Protomyxzoa rheumatica
tccattgcactcgtgttgattccattccattctactccattgcattccattccttatttccgaatggatctcactctgtctccatgacaggagtgcagtggcacagtcttagctcacatttcatttcaccattccatt

SEQ ID NO: 6569 - DNA, 133 bp, Protomyxzoa rheumatica
cactgtttttgtagaatctgtgaagggatttacattgtgaagagatatttgtcagcacagggatatttttgagtgctttgaagcttatgttgaaaaatgaaatagctacacagaaaaactagagagaatcttt

SEQ ID NO: 6570 - DNA, 158 bp, Protomyxzoa rheumatica
ctttctgagaaactgctttatgataggtctgttcatctcacagagttaagttcttcttttgatggaacagtttggaaacactggttttgtagaatctgtgaagggatatttgggagtacagtagggactatgctggaaaaggaaatatcttcagagaa

SEQ ID NO: 6571 - DNA, 132 bp, Protomyxzoa rheumatica
gactcccaaatgtccatttgcagattctgcaaaaacagtgtttgcaaaccgctgaatcaaaacaaagctttaactctgtgaagtgaatccatacacacaaaaaaatagtttcacagataccttacttatagt

SEQ ID NO: 6572 - DNA, 146 bp, Protomyxzoa rheumatica
cttaatttctaggtagaaatttgaaccaagagagatgggacattctggaaatgtagccaggcccagatatattttgtataaaacatcatgtgtgtgtttaaaaggtatcaatcagattttgctccaataatgtgtatgtttggatc

SEQ ID NO: 6573 - DNA, 164 bp, Protomyxzoa rheumatica
ttttccaccatagaccacaaatcgctccaaatatccacttacagattctacaaaaagagtgttttcaaactgctcaatcaaaagaaaggctcatctctgtgagttgaaaacacacagcacaaacaagtttctcagaaagtttctgtctagtttttatgtgaaga

SEQ ID NO: 6574 - DNA, 127 bp, Protomyxzoa rheumatica
tcaaagcgctctatatatacacttgcaaattctacagaaagagtgtttcaaaactagtctatcaaaaggaaggttaaccacgtgagttaaacgcacacatcacagagtactttctgagaatgattct

SEQ ID NO: 6575 - DNA, 124 bp, Protomyxzoa rheumatica
caaagcgcttgaaatctccacttgcaaattccacaaaaagcgtgtttcaaatctgctctgtctaaaggaatgtagaactctgtggttgaatacacacagcacaaagaagtaactgagaattctt

SEQ ID NO: 6576 - DNA, 156 bp, Protomyxzoa rheumatica
ctacctgagaaactgctttggtatgtgtgcattcatctcacagatttaaacctttcttttcatacagcagtttcaaaacactgtttttgtagtatccacaaatggatatttaggagagtattcaggcctatggtgaaatagggaacattttcatat

SEQ ID NO: 6577 - DNA, 194 bp, Protomyxzoa rheumatica
ctttttcaccataggcctcaatgatctctgtaatatcccattgcatattaaacaaaaacagtgttccaaactactgaatgaaaagcatgcttaattccgtgagatgaatgcacacatcgcatagcagtttctcatgtagctttcttctagttttcatcctgggatattacctttttcaccattggccacaaaga

SEQ ID NO: 6578 - DNA, 151 bp, Protomyxzoa rheumatica
ggtttttatcctgaaatatgttaatgtgatgtgtcacatttattttgatttacgtatgctgaaccatccttgtattcctgagatgaatcccacattaccatggtgaatgatctttttgatgtattgttaaatttggtttgctagtattttg

SEQ ID NO: 6579 - DNA, 123 bp, Protomyxzoa rheumatica
ttatattttatgtacagtatataatatgtatttggtgtacattgatattttatgtacaaaatataatttatactttgggtagtttgatattttatgtatactatgtaatatatagtttgagta

SEQ ID NO: 6580 - DNA, 127 bp, Protomyxzoa rheumatica
cttttccacaataggcctcaaagctctccaaaggtccacttgcagattctgcaaaaaaagagattcaaaactgctcaatcaaagtataggtttggctgtgtgagttgaatgcacacctcacaaataa

SEQ ID NO: 6581 - DNA, 226 bp, Protomyxzoa rheumatica
acctaacatgtaatctattctgcagaatattctttatgtacttgagaagaacgtgtcatccgttgctattgggtagaatattctgtgtatgtctgttatgtccgttttgtctatagcattgttcaagtctcctgtttctttcttgatcttccatattaatattgtacatattattgaaagtggggtattgaaatctcctactattatggtgtggatttctattttt

SEQ ID NO: 6582 - DNA, 125 bp, Protomyxzoa rheumatica
aatcgaatggaatgcggtgaagtggagtggagaggattgaaatggagtggaatggaatgtgttggattgtaattgaatgtataatagtggagtggagtggaatcgagagaaatggaatgcaatgg

SEQ ID NO: 6583 - DNA, 162 bp, Protomyxzoa rheumatica
cagaagtattctcagaaacttctttgtgatggatgtactcaactcatgaagttgaacttttcttttaatacagtagttttgaaacactctttttgtagaatctcaaagtggatatttggattgctttgattctttcgttggaaatgggaatatcttcacata

SEQ ID NO: 6584 - DNA, 128 bp, Protomyxzoa rheumatica
gaatagtcaaagaaatatttgagagccctttgagtcctatgagggaaaaactgaatatcccgagataaaaactagaaataagctatctatgaaactgctttttgatttctagattcatctcacagagt

SEQ ID NO: 6585 - DNA, 251 bp, Protomyxzoa rheumatica
cattgaatggaatcgaatggaatcatcaaatggcatagaatggaatcatcatcaaaaagaatctaatggcattatcgaatggactcgaatggaatcatcgaatggagatgaatggaatcatcatcgaacggaatagatgggaaacatcgaatagattttaatagaatcatcctcaaatggagttgaacggaatcattgaatggacacaaattgtatcgttatggaatgtaaacaaatggaatcttcgaata

SEQ ID NO: 6586 - DNA, 145 bp, Protomyxzoa rheumatica
cataagtcagatcatgtcatttcttcacttaaaattatttttggttgtttggttttgttttgttttgtttttgagacagggtcttgctctgctgcccaggcaagaatgcagtggagaaatcacagctcactgcagctccaacttt

SEQ ID NO: 6587 - DNA, 256 bp, Protomyxzoa rheumatica
agcattcttagaaacttctttgtgatgtgtgcatgcatctcacacatttgaaattttctcttgattgaacagtttttagacactctttctgtagaaactgcaagtggatatttggagcgctttgaggcctgttgaataaaaggaactatcttcatataaaaactacacagaatcattgtgagaaacttgtttgtgatgagtgcattcataacacatagttgaacctatcttttgattcagtagttttgaatctctc

SEQ ID NO: 6588 - DNA, 162 bp, Protomyxzoa rheumatica
aagaagtgaagctgggagtactgtgtgaggtgctctctgtggtggtgatcacagaagtgaagctcagaggactgtgtgaggtggactccgtggtggtgatcaaagaagtgaagctgggaggactgtgtgagggggtttcggtggtagcgattgaagaagtga

SEQ ID NO: 6589 - DNA, 149 bp, Protomyxzoa rheumatica
ggaatcctaagtaagggacaaacattcagaccacagcaggagtgttctggaagcctatgtgtggagaataattcagaacttcgtagcagtgttctggaatcctatgtgatgtacaaacgttcaggccacagcaacagtgttctggaatc

SEQ ID NO: 6590 - DNA, 141 bp, Protomyxzoa rheumatica
atccctgacgtatgattccagaacactgctatgtgggtttaaatgtttgtccctcacataggattccagaacttagctacgagggtatgaatgtttgccccgctcatgggactccagaacactcctgctgtgttctgaatg

SEQ ID NO: 6591 - DNA, 147 bp, Protomyxzoa rheumatica
tggggtgtgggtagtggggagggatagcatttggagatatacctaatgctaaatgacaagttaatgggtgcagcctaccaacatgtcacatgtacacatatgtaactaagctgcacaatgtgaacatgtaccctaaaacttaaagtg

SEQ ID NO: 6592 - DNA, 123 bp, Protomyxzoa rheumatica
gacaatttttaaaattatgtatctatcataagcatattatacttatctcctaaagccttgtttaatatttccattcaaattttatacactgccatatgatcccattacttcacaacttagatg

SEQ ID NO: 6593 - DNA, 146 bp, Protomyxzoa rheumatica
aactgaagtttatctttttatctctcctttttggcaggacaaattttagatatgtttttaaagaattaataacttttttcctttctctgagacatggtctcactttgttgcccaggctggagtgcagtgatgcaattatagttaac

SEQ ID NO: 6594 - DNA, 192 bp, Protomyxzoa rheumatica
tcggattcttgaaggacatgatgtggatacaacagaaatgactgagtctataccatattatctagaatacagtggcatttaattaatgtttgttgagttcttaaaaacatatttttccatatttttctcttaacagtactggcacaatttcggtatttaaaaagtatgtgtgtattttacagcagatttgtc

SEQ ID NO: 6595 - DNA, 123 bp, Protomyxzoa rheumatica
catagaatgaattgaatggaatcatcgaatggtctcgaatggaatcatattcaaatggaaccgaatggaaacgaatggaatcatcacataaaatcgaatggaattatcatcgaatggactcga

SEQ ID NO: 6596 - DNA, 145 bp, Protomyxzoa rheumatica
accttcttttagacagagcagatttgaaacactgtttttaaggaatttgcaagtagagatttcaagcgctttgaggccaattgtggaaaaggaaatatcttcgtataatcaccagacagaatcattctcggaaactactttgtga

SEQ ID NO: 6597 - DNA, 334 bp, Protomyxzoa rheumatica
tcaatagttgcagatacaaaatccaacatcctttcatgatgaaatattcaacagagaaggaaagaagggaacatttttaaactaataaagagcatatttaaaaccacagccaatagcatacttaatattggaagcctgtatacttatatcctgagatcaggaacaagatagataaatccactctcactacatccattcatcattgtgctggaggtgctagccaggacaatttggcaacagaaataaatgtaagccatctagattacaaaaggagaagtgggccaggcatggtggcacatgtctgtaatcccagcactttgggaggctaaggtgg

SEQ ID NO: 6598 - DNA, 218 bp, Protomyxzoa rheumatica
tataaaatacaaatgaataaataaaaaatattttgtttatacactggaagaatactgttgatatagctacccaaagtgatctacagacttaatgtgatttttatcaaaataccaatgacattttttcacagaaataaaaaaatttaaatttatatggatccacaaaaaactctgaatagacaaagcaactttgagcaaaataagcaaagctaaaggca

SEQ ID NO: 6599 - DNA, 123 bp, Protomyxzoa rheumatica
gcagattatacaaaaagagtgtttcaaaactgatcaatgaaaagaaattttcaacactgtgagtggaatgctcacatcacaaagaagattatcagatttcctctgtgtactttttatgtgaag

SEQ ID NO: 6600 - DNA, 198 bp, Protomyxzoa rheumatica
gacctatatctaaataattatctggctgttgtactagaattctacacattctgagagtttacttcttttttcctttacaaaaatattgtttaccccaattttcttcttatttattgaaatcagtcatattaatatgttcagtattcatttacattgttggcattaatagtagctatttaattgtgatcctttaaacaa

SEQ ID NO: 6601 - DNA, 198 bp, Protomyxzoa rheumatica
ttctgtctagtttttatatgaagatatttccttttctaccgtagccctcaaagcggtccaaatattcacttgcagattctacaaaaagagtgtttcaagactgctctttcaaaaggaaggttcaattctgtgacatgaatgcacacatcacagagaagtttttgaaaatgcctttgcctagtttttatatgaagatat

SEQ ID NO: 6602 - DNA, 144 bp, Protomyxzoa rheumatica
ggaatggaatggaatggaatggagtggagttgcgtgtagtgtagtgtagtgtagtggaatggagtggaatggaatgcagtgcagtgggatggaatggaacggaatggaagacaatgaagtgcagtggattgtaatggaatggag

SEQ ID NO: 6603 - DNA, 175 bp, Protomyxzoa rheumatica
gataattttttggatatatcctcaaaagcacagataacaaaagcaaaaatagacaaatgggattacacagcaaggaaagaatcaacagagtgaagagacagcccacagaatgggataaaatatttgcaaactctataactgataagggattaatatccaaaatatagtcatgtga

SEQ ID NO: 6604 - DNA, 238 bp, Protomyxzoa rheumatica
cagtgttctggaatcctatgtgagggacaaacattcagaacttcataacagtgttcttaaatccaatgtgagggacaaacattcagactgtcgtagcggtgttctggaatcctatgtgagagacaaaccctcagaacacagcaagagtgttttggaatcctatgtgagagacaaatattcagatcctcatagcagtgttctggaatcctatgttagggacaaacattcagactatcgt

SEQ ID NO: 6605 - DNA, 128 bp, Protomyxzoa rheumatica
gtgtgcattcatctcacagagttgaacctttcttttgactgaacagttttgaaacactgtttttgctgaatgtgctagtggatatttggagcgttttgtggcctactgtggaaaagcaaatatcttca

SEQ ID NO: 6606 - DNA, 233 bp, Protomyxzoa rheumatica
tagcattgttctggaatcctatgtgaggaaaaacccttcagaacacagcagtagtgttctgcggacctacgtgcgggacaaacatacagaccctcatagcagtgttctggaatcttatgtgagggaaaaacatttagacacacgtagcagtgttttggaatcgtacgtgagggtcaaacacacagaacccgacagcagtgttctggaagcttaagtgagggacaaacattcag

SEQ ID NO: 6607 - DNA, 127 bp, Protomyxzoa rheumatica
acagaagcattctgagaaacttctttgtgatgtgtgtgttcttctcacagagttaaacattttttttgattcagcagattggaaacagtcatttggtagaatctgcaaagggatacttgtgagccca

SEQ ID NO: 6608 - DNA, 176 bp, Protomyxzoa rheumatica
tctcagctctgaaatcatcaaagagaatgaattctctcttcctctacccttgtgttttatttgggatttaatggattggatgaggcccgctcacactgggaagggcaactactttactaattctacatattcaaatgttcatctcatcaaggaacaccctcacagacacatccaga

SEQ ID NO: 6609 - DNA, 218 bp, Protomyxzoa rheumatica
aagtattgtcagaaacttatttgtgatatttgcattcaactcacagagttgaacattcctcttgatagagcagttttgaaacactcttttggaagtgtctgcaagtggatatttgtgcatctttgtggccttcgttggaaaagggatttcttcatacaaaactagagagaagaattctcagaaatttctttgtgttgtgtgcattgaactcacagtgt

SEQ ID NO: 6610 - DNA, 128 bp, Protomyxzoa rheumatica
tagttttatattttatgtacagtatataatatatagtttgagtccttttttttatgtactgtataaaatatatagttttgatactttgatattttttgtacagtatatagtttgaatactttgatatt

SEQ ID NO: 6611 - DNA, 136 bp, Protomyxzoa rheumatica
aaccgtcgttgcagtgttctggaattctaagtgagggacaaacactcagaacccagctgcagtcttctggaaccctgtgtgagagaccaacattcagacaatcgtagaagtgttctggaatcctatgtgagggaca

SEQ ID NO: 6612 - DNA, 148 bp, Protomyxzoa rheumatica
tggaatggaatggaaaggaacggaatagaccacaaagtaatgtacttaaatgaaatggactcaaatagaatgaaacaaaaaggaatgttcttaaatggaatttatttgaatagaatggaatcgaatggaattcaatagtatggaatgg

SEQ ID NO: 6613 - DNA, 150 bp, Protomyxzoa rheumatica
cattccattaaattccattcaaatccactccattaaagtccatttcattccactccattccattagagtccgttacattctattccactcgagtccattctattccaaaacaatgaagtccattccattccatgcatttccattccattc

SEQ ID NO: 6614 - DNA, 200 bp, Protomyxzoa rheumatica
taatgttgtaagatgaatgcacacatcacagagcagttgctcaaatgcttctttctagtttttatccaaagatatatcctttttcaccataggcctaactgcactttcaaatatcccattgcagattttacaaaaccagtgcttccaaactgatcaatcaaaaaacaggtttaacactgtgaattgaatgcagacatcac

SEQ ID NO: 6615 - DNA, 126 bp, Protomyxzoa rheumatica
aattggatatttggaacgctttgcctcctatagtggaaaaggaaatatgttcacatataaactagacagaagcattcttggaatcttctccatgacgagtacattcacctcactgggttgaacctt

SEQ ID NO: 6616 - DNA, 140 bp, Protomyxzoa rheumatica
atagtcctcaaagcgctccaaatgtacactggcagattctacaaacagggtgtttcaaaactgctcagtgaaagaaggttcaactccgtgagatgaatgcacagattacaaaggagtttgtcagaatatttctgtgtagt

SEQ ID NO: 6617 - DNA, 123 bp, Protomyxzoa rheumatica
ccacaggaggcaccccctgtgtgcaggtccacgggttcccagtaccattgcctctcaccaagcatgttaaaaattccaaggggtgttggactggcgcctcggttcacacctgtaatcccagca

SEQ ID NO: 6618 - DNA, 134 bp, Protomyxzoa rheumatica
acttctctgtgatgtgtccattcacttcacagagttgaacttttctttcaactgagcattttggaaacactcttttgtagaatcttcaaggggacatttgcagcactttgtagcctatggtagaaaaggaaata

SEQ ID NO: 6619 - DNA, 139 bp, Protomyxzoa rheumatica
gcctacacaagttttacagcacctcagcgatcagtgcagagatatgtcctaatgtccccctaggcagagcttacacaagtgtcacatctcctgggtgaacagtgcagagataagtcacaatgcccccttaggcagaacc

SEQ ID NO: 6620 - DNA, 148 bp, Protomyxzoa rheumatica
attgagtagtttttaaaccgtctttttgtacaatctgcaaagtgatatctgtgaacgctctcaggcttatggtgaaaaaggaaatatcttcacctaaacctatagagaagctttctgagaaactagtttaggatgtatgcattcatct

SEQ ID NO: 6621 - DNA, 135 bp, Protomyxzoa rheumatica
tgatgattccattcgagtccatttgatcattacgttcgagtccattcagtgaatccattcgatttattttcatgatgatcccattcatttccatttcatgatgatcccattcgattccttttgatggtgattcca

SEQ ID NO: 6622 - DNA, 138 bp, Protomyxzoa rheumatica
cttctgtctagtttttatatgaagatacttccttttccacgatgggcctcaaagtgatccaaatatccacttgcagattctacaaaaggagtgtttcaaatctccccaatcaaaaaaaaagatttaactctgtgagat

SEQ ID NO: 6623 - DNA, 237 bp, Protomyxzoa rheumatica
tggaatcaactcgaattgaatggactcgtatggaatagaatacaatggaacggtatcgaatggaatggaatggaatcgacccaaatgtaatggactctaatggaatggactcaaatagaatggacacgaaagaatgttctcgaaaaaaatttactcgattagaatggaatagaaaggaaggcaatattaaggaatgaaatcgaatggaagggaacggaatggaatggaatggaatag

SEQ ID NO: 6624 - DNA, 218 bp, Protomyxzoa rheumatica
tcagtgcagagatatttcacaatgcccctgcaggcagagcgtaagcaagagttacatcaccttgatgatcagtacagagatatgtaacaaggccccctatagtcagagcctgcacaagagttacattacatgggtgatcaatgcagtggtatgtcaatatgccccataggcagagcctggtaaaacgttacatcacctgggagatcagtgcagagata

SEQ ID NO: 6625 - DNA, 129 bp, Protomyxzoa rheumatica
cccagataaaaactagaaagaagatatctgtgaaactgcattgagatgtctggattcatctcacagggttaaaacattcttttgattaagcagtaggaaactctatttttgtagaatctgtgaagggac

SEQ ID NO: 6626 - DNA, 176 bp, Protomyxzoa rheumatica
atccattccattgcaatccattccatcagagtccattccattctcttccttttgagtccactcccttccattccatgagtttccattgcattaaatttcattctattccaatcaagtatgttccattccattccattccattttattcatgtccattccattccattccattcgag

SEQ ID NO: 6627 - DNA, 144 bp, Protomyxzoa rheumatica
ttctgtgaagatatttcattttccaacataggcttgaaatccctccaaatatccactagcagattctacaaaaagactgtttcagatctgctctctcaaaagaaagtttcaactgtgtgagttgaatgcatacatcagaaagaa

SEQ ID NO: 6628 - DNA, 132 bp, Protomyxzoa rheumatica
gaacgcagaggtgacgtaaaacttgcctaggctttgcctacagtgggattaatgacatatcactgcactgatcacccaggtgttgtaactcttgtgtaggcttggcttacagggtgtattgtgagatatctc

SEQ ID NO: 6629 - DNA, 152 bp, Protomyxzoa rheumatica
gagaaactactttgtaatgtgtgcattcatctcacagagttgaacctatcttttgattgtgaagtttttaatctctcttcttgtagaatctggaagtggatatttggagccctttgtggcctatggacgataaggaaatatcttctagtaaa

SEQ ID NO: 6630 - DNA, 131 bp, Protomyxzoa rheumatica
agttgaacgctcaaaacacaatgtggtttctgagaatgattctgcctagtttttacatgaagatatttcgttgtctactgtagacttcaaagctctctaagtatgcccttggaagttttacgttaagagtg

SEQ ID NO: 6631 - DNA, 189 bp, Protomyxzoa rheumatica
agagtgtttccatactgctcaatcaaaagaaaggatcaattctttgagatgaatgcacacatcacaaagaactttctcagaattgttctgtctagtttttatgtgacgatatttccttttccacggtaggcatcaaagcgctccatatgtccacttgcagattctacaaaaagagaggttcaaaactgc

SEQ ID NO: 6632 - DNA, 135 bp, Protomyxzoa rheumatica
atggacttgaatggaacggaatggactcaaaaggaatgtaatggaatgtaatgaaatggactccaatgtaacggaatgggctcaaatgggaattaattgcatcgaattgattggaaaataatgtaatggaatgga

SEQ ID NO: 6633 - DNA, 127 bp, Protomyxzoa rheumatica
cagaaacttctttgagatgtgtgctttcaactcacaaagttaaacctttgttttgatagagtcgttttgaaacactcattttgtggaatctgcaagttgatctttggagcactttgaggcctatggt

SEQ ID NO: 6634 - DNA, 274 bp, Protomyxzoa rheumatica
aatttaatcatcatcaaatggaatcgaatggaataatcaaatggactcaaatggaatcatcattgaatggacttaaaaagaattatcaaatggacatgaacggaatcatcattgaatggactcaaatggaattattgaatggactcgaatggattcatggattggactcaaatggaattaacaaatgggctcaaatggaaacatcgaatgaactcaaatggaatcattatcgaatggaatcaaatggaatcatcgaatggaatagaatggaatc

SEQ ID NO: 6635 - DNA, 144 bp, Protomyxzoa rheumatica
aaaattcttttgccataaagccgcagatgcagattgctcagctactggtagtaccgtgtcaccaattaacccccgaggaaatttctgccccaataggaacatcatatagaactggaggatatgggtccaccaaagtgggcagct

SEQ ID NO: 6636 - DNA, 150 bp, Protomyxzoa rheumatica
tcctatgtgagggacaaatattcagaccctcatagcagtgctcgggaatcctatgtgagggacaaaatttcggacaccagcaggagtgttctggaatcctatgttaggaacaaacactgagacagtagtaccagtgttctggaatcctat

SEQ ID NO: 6637 - DNA, 201 bp, Protomyxzoa rheumatica
tatcctcatattaagactagacagaaactttctgagaaacttctgtgtgatgtgagcatttgtctcacagaattgaaactttcttttgatatagcagtttggaaacaggctttttgcagattctgcgaagggatttttgtgagcggtttgatgtctatggtgagaaagtaaatatccacaagtaaaatctagacagaaact

SEQ ID NO: 6638 - DNA, 122 bp, Protomyxzoa rheumatica
cattcaagaccgttcctttcgattccattttatttgagtccgttcgattccagtctattacattagagtccattgcatttcattctattccattcctttcaatgccattccattcgattcta

SEQ ID NO: 6639 - DNA, 132 bp, Protomyxzoa rheumatica
atatttcagagagccttcaggcctatggtgaaataggaaacatcttcagatgacaactacaaagaagctttctgagaaactacttcatgatgtgtccattcaccttacggagttaaactcttctttggattc

SEQ ID NO: 6640 - DNA, 148 bp, Protomyxzoa rheumatica
aatcatcgaatggaatcgaatggaatcatcattgaatggactcgaatggaattatcatcaaacggtatcaaatgggatcatcgaatggactcgaatggaataatagaatagaatcgaatggaatcatcaaatggaattgaatggaaac

SEQ ID NO: 6641 - DNA, 393 bp, Protomyxzoa rheumatica
gcttgtctagacaaaatggtgcatgaatatatcaacattcactagagggaacatttagccagctaagtgaatctgccagaggaatgtaaagatttaaaatgtctacggttcctgagctagtgacttctacagctcaatctgggactactaagtctgtgtggtccagaatatatgtcatttattaggcactgggtttccaaaccaattcagcctcattgaaatttacaaatacagtgtcacttacacatatgtaacaacattcagatgagaaaacttttagccaggtaaaggaatctgccaggggaatgcggagatttaaaatgtctatgggctttgaccaagtaacttctacagctctatttgggactactaagtctgtattgtacagaattt

SEQ ID NO: 6642 - DNA, 195 bp, Protomyxzoa rheumatica
tccattcaatgatgattccgttcgagtccatttgatgattctattcaattccatatgatgatgattccattcaattccattcattggtgattccattcatttctattcattgattccattccattccattcaacaatgattccactcgattccactcgaggattccactcgattaaagttgacgatgattccatt

SEQ ID NO: 6643 - DNA, 122 bp, Protomyxzoa rheumatica
cagattttaacctttcttttgatagagcagttttgaaacactttttgtagaatccgcaacgaatatttggacgttttgggggccttcgttggaaacgcgatttcttcatatataacatgaca

SEQ ID NO: 6644 - DNA, 181 bp, Protomyxzoa rheumatica
attcaactcacagagtggaacctttctattgatagagcagttttgacacactctttttgtagaatctgcaagtgttcatttggagcgctttgaagccaaaggtggagaaggaaatatcttcaaagaaaaactagacagaaacattctcagaaacttctttgtgatgtgttccttcaactca

SEQ ID NO: 6645 - DNA, 156 bp, Protomyxzoa rheumatica
atcacctgggtgatcagtgcagagatatttcacaatgcgcctgcaggcagagcataagcaagagttacatcaccaaaagatcagtgcagagatatgtcacaagccccccaataggcagagcctggacaagagttacatcaccttcgtgatcaatgc

SEQ ID NO: 6646 - DNA, 130 bp, Protomyxzoa rheumatica
gcttcctcagatagctgccttctagatgtaatcctgggatatccccttttatgtcactggcctcaaagagctcccaaatatccacatgcagaatggacaaaaacagattttccaaagtgctgcatacaag

SEQ ID NO: 6647 - DNA, 214 bp, Protomyxzoa rheumatica
aacacgggatcccagcctcaggcctgcaaggacggtgttggtttgggtgagtcccaataaaagacctgccgccgtccctgatctcgaggacgggtcggcctgcgtggccctgggctgctctctcgcccgagggtcgttctcctccaaaagagaaccccgcagccacaggggttgcctgggggtgtgtgtttcaatgcctctgctgtatgactgt

SEQ ID NO: 6648 - DNA, 199 bp, Protomyxzoa rheumatica
atcttttgtgagggataaaaatagagaccacagcaggaatgttctggaatgctatgtgagcaacaatcattgagaccctagcagcagtgttctttggtcatatgtgaggcacaaacattcagaccccagcagcagtgttctggaacactatgtgagggacaaacattcagacaatcgtagcactgttctggaatcctat

SEQ ID NO: 6649 - DNA, 122 bp, Protomyxzoa rheumatica
agaacatttcttttgattgagaaatttggaaacagtttttttgtagaatctgcaaagggatatttgtgatagttttgaggtctctggtgaaaaaagaaatatcttcacataaaaactagaca

SEQ ID NO: 6650 - DNA, 199 bp, Protomyxzoa rheumatica
tctagtttttatctggagatattcagttttttcccataggtctcaaagggctcccaagtgtcctttcgcaaatactctaaaaagagtgtttctaaccttttgaatcaaaagtaaggtttaactctgtgagatgaatcaacacatcaccaagcagtttcacagttagctttttttcaagtttttatctgaaagtagtcat

SEQ ID NO: 6651 - DNA, 140 bp, Protomyxzoa rheumatica
aagaatctgtacgtggatatttggagccctttgtggcctatggtggaaaagacaatatcttcacacgaaaaatacacagaagcattccgagaaacttctttctgatgtttacattcatctccctgagttggccctttctt

SEQ ID NO: 6652 - DNA, 130 bp, Protomyxzoa rheumatica
tgtgaagatatttccttttccatcttagtcctcaaatctctccaaatatccacttgcagatactacaaaaacactgtttaaaaactgctgtctcaaatagcaaggttcaactctgtgagttgaatgcaca

SEQ ID NO: 6653 - DNA, 232 bp, Protomyxzoa rheumatica
tctggaatcctatgtgagggacaaacattcagaccacagcgggattgttctggaatgatatgtgagggacaaacactaagaaaataacaggaatgttttggaatcctatgtgagtgacaaaaattcagaccctcgtagtagtgttctggaatcgtatgtgagggacaagcattcagaccacagcaggagtgttctggaatcctatgggagggacatacattcaaaccctagt

SEQ ID NO: 6654 - DNA, 140 bp, Protomyxzoa rheumatica
caatcattcaaacaacagcgggagtgttctggaatcctatgtttaggaaaatcattcagaccctcgtcgcagtgtactggaattctatgtgagggcaaacattcagaccacagcagtagtgttctggtatcctacgtgag

SEQ ID NO: 6655 - DNA, 138 bp, Protomyxzoa rheumatica
tagattctattcgtttccattccactccgatcacctcctctccattccattccattttattccaatcctcttcactactctccattccactgaaatccattccattccattacatctctttccactgcattccattcc

SEQ ID NO: 6656 - DNA, 128 bp, Protomyxzoa rheumatica
tccattccaatccactccattccactccattccacggcaatccataccgttacactcaattccactccattccagtcagttctattccataccattctatttatttccattccactcaactccaatcc

SEQ ID NO: 6657 - DNA, 135 bp, Protomyxzoa rheumatica
atttccttggatctaaaatgaatctcttgtaggcagcatattaatggatcttttttttaatccatttggccactctatgtcttttgattgaggaatttaatccattaaatttaatgtaattactgatagggaagg

SEQ ID NO: 6658 - DNA, 148 bp, Protomyxzoa rheumatica
catcacctgggtgatcagtgcagagatatgccacaatgcctccattgtcaaatccaagaaaagtgtccgtcacctgggtgatcagtacagacatgtgtgacagtgcccccagtaagcagagccaagagaagggtcccatcacctgggt

SEQ ID NO: 6659 - DNA, 174 bp, Protomyxzoa rheumatica
ccattctattccattccattgcattccattccattccatttgatttcattccattcaattccaaggcattcaaatgaattacattacaatccattacattcgagtcctttctattccagtccattccattcttgtccattccatttgattcaactccattcaataccatttgat

SEQ ID NO: 6660 - DNA, 122 bp, Protomyxzoa rheumatica
atttctcatgagacatatgaaaattcacactggaaagaaaccttacgaatataactaaagtgggaaagcctttagatattccctacaccttaataaacatttaagaaagaacattatggaga

SEQ ID NO: 6661 - DNA, 322 bp, Protomyxzoa rheumatica
aaatggatattaggatagctctgaggacttcgttggagacgggattacatataaaaagtggacagcagcattctcaggagcttctttgtaatgtttgctttaagtcacagagttcaatattcccttccatagagtgggtttgaaacattctttctgtactatctggaagtggacatttcgagcgatttcaggcctaggttgaaaaaggaaatatcttccaataaaaattagacggaagcattctcaaaaatttctttgtgatgtgtgtcctcaactaacagggttcaacctttcttatgatacagcagtttggaaacactct

SEQ ID NO: 6662 - DNA, 126 bp, Protomyxzoa rheumatica
ttatcttctttctagtttttatctagggatattctgtttttcccatagacctccacaaactcccaaatgtacctttgcagctgttccaaaaagtgtttccaactttttggaaactgaatgaaaaga

SEQ ID NO: 6663 - DNA, 202 bp, Protomyxzoa rheumatica
gcgtcttatgtctacttctttctacatagaaaaagtaacagtctgatctctcttttccccacactatataggtatgtgtacacttttctatatctgaattagccatatgcaaggaaaaactaaaacagttttcagaagttccgggaaaattcatagacaaatttaaaaggctaactttgacgtatgatctgaccaggtagga

SEQ ID NO: 6664 - DNA, 195 bp, Protomyxzoa rheumatica
tcaattcgaccccattccattggagtccattccattccattccattccttcccattccattccgttcagttcgatttcaatccgttcgatttcattttgttcctgtccattccattcgagtccatttcattccagtcaaatccattcgattccattctatttgattactttccattcgattccattcctctcgat

SEQ ID NO: 6665 - DNA, 148 bp, Protomyxzoa rheumatica
ccattccatgattccattcgatttcattcgatgatgattccatttgatgctattcgatgattccattcaatttctttcgatgattattccattcaattcctttcgatgattgcatgtgattcaatttgatgatgattccattcgagtc

SEQ ID NO: 6666 - DNA, 231 bp, Protomyxzoa rheumatica
tgcaaaaagagagttccaaaactggtcaatcaaaagaatggtttatatctgtgagatgactgcacacatcacaaaaactattacagtgtgcttctttctagattttatgtaaagatatttccttttctaccataggctgcaaagctctccaaatatccacttgcagattgtggaaaaagagtccttccaaactgctatatcaaaaggaatgttcaactctgtgagattaat

SEQ ID NO: 6667 - DNA, 154 bp, Protomyxzoa rheumatica
attctctttatatggtgtatcacatttattgacttgcatatgtttaaccgtcctgcatctctggtttctcctcagatcgtatgcatctttcacctttgatggttcattttatttgccaagttgggttgcctagagatttggttaaacactctgg

SEQ ID NO: 6668 - DNA, 136 bp, Protomyxzoa rheumatica
tccattgtaatccatttgatgattccattccattccatttggtgagaattccatttgaatccattcaatggttccattcctttctattcgatgatgattccatgagtcctttagatgattccattcgattccaatg

SEQ ID NO: 6669 - DNA, 217 bp, Protomyxzoa rheumatica
gacagagagctttttcaagaaataatgactgaaaatttctcaaatctcaggaaagaagtggatataaaaattccattttatggaagatcaatgaattccaactaggatgaagtcaaagaaatccacattaagaaacaatataatcaaactgtcaaaagtcagatacaaagagaaaatcctgaaagcagccagagaaaagcaacttgtcatctacaag

SEQ ID NO: 6670 - DNA, 362 bp, Protomyxzoa rheumatica
agtgatcagtgcagagaactgtcaaaatgcccctttaggcggagcatagaccacacttacatcacctgggtgatcagtgcagtaatatttcacaaagccccctgtaggcagagagtggaaaagagtaacataaccgaggtgatctgtgcagagctatgtcaaaacgcccctgtagtcagatcctagataaatgttacatcacctggctgatcagtgcagagatacgtcacaataaccccagtaggtggagcctagacaacagttacatcacctgggtgatcagtacagaaatatgtcacaaagcccctgtaggccaagcctagacaaggattacatctcctgggtgatcagtgcagaaatat

SEQ ID NO: 6671 - DNA, 124 bp, Protomyxzoa rheumatica
agttgaaacttcctttcaatagagcagttttgaaaatctctttttgtacaatttccaagtgtttaattattgccgtttgaggcctatgggacaaaaggcaatatcttcatagaaaaaatagaca

SEQ ID NO: 6672 - DNA, 190 bp, Protomyxzoa rheumatica
ttgatgggctttaaccacttgtcttttcgttggtgcatttagaccatgacattcaaagtgattatacagttgggttaattttgccatatcattttccattcactcctattgttctttgttcttgctttgtcctccactctttttctgccttttatggagtttatgattttatatgatttttatttcccct

SEQ ID NO: 6673 - DNA, 136 bp, Protomyxzoa rheumatica
cttttctaccacaggcctcaaagctccccaagtgtccacattcagattgtacaaaaagagtgtttcaaagctactctatcaaaagagatgttcaacactgtgacttgagtgcacacatcacaaagaagtttctgag

SEQ ID NO: 6674 - DNA, 146 bp, Protomyxzoa rheumatica
caaaaagagtgtttcaaaagtgctctatcaaaacaaaggtcaaaatctgcgagttgaacgcacacttcgcaaagtagtttctgagaatcattctacctagtttttctatgaagatatttccttttgtaccatatgcctcaaatggc

SEQ ID NO: 6675 - DNA, 133 bp, Protomyxzoa rheumatica
caactctgtgagatgaacgcacgtgtcataaagaagtttctttgaatacttctgtcctgtttttatgtgaacatattttcttttccaccataggcctttaagcgctccaagtatccacttgcagattctacaa

SEQ ID NO: 6676 - DNA, 171 bp, Protomyxzoa rheumatica
cgaatggaattttcttcaaaaggaatcgaatggaaatatcattgaatagaatcaaatgggatcatcgaatgaaactgaatggaatcatcatcaaaacgaatcaaaataaaacaaagaatagaatccaatggaatcatggaatggaatcaaatggaatcatttaatggactt

SEQ ID NO: 6677 - DNA, 147 bp, Protomyxzoa rheumatica
tgtaggcagagaccaggcaagagttggatcaccttgggataagtgcagagctatgtctcattccccctgtgggcacatcctagacaagagttacatcagctcggttaacagtgcagagttgtcaacatgctcctgtaggcagagcct

SEQ ID NO: 6678 - DNA, 125 bp, Protomyxzoa rheumatica
ctgatcacccaggtgacggactcttgtcttggatctgcctttgggggccctgtgacatatctatgcactgatcacccagctgatgtaactgttgtacaagctctggctaccggggaattgtgaga

SEQ ID NO: 6679 - DNA, 141 bp, Protomyxzoa rheumatica
tcacgccaatcttagacatggaaatatcttcgtatttaaagtacacagagtcattcgcagaaactagattgtgatgtgtgcctgcaattcacagactttaactttcttttcatagagcagtttggaaacactctatttgta

SEQ ID NO: 6680 - DNA, 187 bp, Protomyxzoa rheumatica
tttgtgagatgaatcaacacaacacaaaccagtttcacagaaaggttctttcagtttttatctgggaatatttgctttttctccataggtatcaatgggctctcaattgtcccttcacaagttcttcaaaaagacagtttacagcctgctgaattaaaagaaaagtttcattttgtgagatgaatca

SEQ ID NO: 6681 - DNA, 146 bp, Protomyxzoa rheumatica
attcgattccattcgatgatgattccatttgagactgttcgattatttcattcaattccattcaatgaggattgcattcaagtccattcgatgattccattcaaatccattcgatgattccatctgattccatttgttgatgattc

SEQ ID NO: 6682 - DNA, 254 bp, Protomyxzoa rheumatica
tgtccattctgtgaatggacatttgggagctctttgaggtcaaaggtgagaagaaaataacccaggataaaaactagaaggaagctctatgagaaactgctttgtgatgtgcgcatttgtctcagagagttaaaattttcttttgattcagtggtttggaaacactttctttttccattctgtgagtggacattttggagctcatggagaccaatggagaaacaacgaatataccaggataaaaactagaagga

SEQ ID NO: 6683 - DNA, 130 bp, Protomyxzoa rheumatica
cacgccactgcactccagcctgggcaacagagagagactccatcacagtaaataaatagataacacagtctcaggtatttttaataacagtacagaaaaagactaatacactacaatatattgagttcaa

SEQ ID NO: 6684 - DNA, 151 bp, Protomyxzoa rheumatica
gaaagccctttgaggcctatggtgaaaatcatgtatccctagataagaattagaaagaaacaatgtgtcaaactgcttggtgatgtttgctttcatcttacaaagttaaacttttttcattcagaaggttggaaacactctctttagagaa

SEQ ID NO: 6685 - DNA, 194 bp, Protomyxzoa rheumatica
cacacatcacaaataagtttctcagaatgcttttgtctagttttatgtgaagaagtttcatttttcaccatacacctcaaagcgctccaaatatccatttgcagattttacaaaaaaactgtttccaaattgctcaatcaaaagaacggtacagctctgtgagataaatgcacacatcacaaagaagtttctca

SEQ ID NO: 6686 - DNA, 147 bp, Protomyxzoa rheumatica
ctcagaaactgctttgtgatgtgtgcattcaaatcactgagattaacctatcttctcctagagaagtttggacacactgtgtttgtaacttctgcaaatggatatttggacctccttgaggcatttgttggaaacgggatttcttca

SEQ ID NO: 6687 - DNA, 133 bp, Protomyxzoa rheumatica
aatacattccattcgattccattccattcaaatcttttacattgcaattgattacattcgagtacattatattccagtccatttcattccaatccaatccattcgattccattccattctatcacattgcatt

SEQ ID NO: 6688 - DNA, 137 bp, Protomyxzoa rheumatica
tgatataatggactttggggacttggagggaaggttgtgggggtgaggaataaaagactacacattgggtacagtgtacatgactcgagtaatgggtaaaccaaaatctcagaaattaccactaaataacttttcca

SEQ ID NO: 6689 - DNA, 180 bp, Protomyxzoa rheumatica
attgaacttactcgaatgtaatgtattgcaatgaaattgattcgaatgatatggaatggaacggaatggcattaaatggaaattaatggaatacaatggaaaggaattgaatggaatgcaagggattggaaatcagtgtaatcaagtggaatggaatcgaatggaatggaatcgaatgga

SEQ ID NO: 6690 - DNA, 187 bp, Protomyxzoa rheumatica
cacacatagtatcccagaacactgctacgattgtctgaatgtttgtcgctcacgtaggattccagaacaatactatgagggtctgaatgtttgtccctcaaatggaattaaagaacactgctacaattgtctgaatgtttgttcttcacataggattccagaacactgcttctggggtctacatgta

SEQ ID NO: 6691 - DNA, 135 bp, Protomyxzoa rheumatica
cagaggtttccaaacactgtttctgtatattctgcaaatgggcattttggatctcattgaggccaatggtgaaaaagtgaatatccctgggtaaaaactagaaggaatctctctgagaaactgctttgtgatgtg

SEQ ID NO: 6692 - DNA, 287 bp, Protomyxzoa rheumatica
ccctacccaaatctcatgtggaaatataatccccaatgccacaagtggggcctggagggaggtgattggaccatggagccggtttctcatgttttaacaccatccccacttggtactatatagcgagtgagttctcacaagatctggttatttaatagtgtgtggcacctccccctctctcttcctcctgctccagtcacataagaagtgcctgcttcccttttgccttccgtcatgattgtaagctccctgaggcctccccagaagccgagcagatgacagaatca

SEQ ID NO: 6693 - DNA, 269 bp, Protomyxzoa rheumatica
catatcactgcacttttcaccaaggtgatgtaagccttgtatgggatttgcgtatagaaaactttctgacatatctatgcactgatctctgaggtgatgcaactcttctctaggcacggcctacaggggacgttggtgtatctctctgcactgaacacccaggtgatgggctcttgtcttagatctgactacatggtcattgtgacacacctctgaactgatcaaccaagtgatgaaactcttctaggctctgcctacaggagctttgt

SEQ ID NO: 6694 - DNA, 126 bp, Protomyxzoa rheumatica
ttccattcgagtccattccattccatttgatgccattcctttcgattttattcctttcgactccattgcattccattccattccatccgattctattccattctattccattccattgcattccat

SEQ ID NO: 6695 - DNA, 135 bp, Protomyxzoa rheumatica
caaatgataatggaaacatagcatagaaaatcctatggagtatcgtaaaagaggtactgttataaaaggaaaatttataactgtaagtgcctacataaaaaacagaaagacttcaaataaataacctaaaaatac

SEQ ID NO: 6696 - DNA, 151 bp, Protomyxzoa rheumatica
cgtgggtctaaatgattgtccataacacagaattccagaacactgctaagagagtctgaaaatttgtccatcatataggattctagaacacttctaaggggttctgaaatattctccatcgtataggattctacaacactcctgctgtggt

SEQ ID NO: 6697 - DNA, 128 bp, Protomyxzoa rheumatica
ctgggaaggaatggaatggaatggaatggaataaaatgtaatggaatggaatcgaaaggaatgtagttgaattgcatggacctgaaagcaatggaatggtatggaacagattggaagggaatggaatg

SEQ ID NO: 6698 - DNA, 189 bp, Protomyxzoa rheumatica
acggaatggaacggaacggaatggaatggaatggaactgaatggaatttcctcgcatggaatggaatagactagaatggaatggaaaggagtaactcgaataaaatggaatgcaatggaatgcactcgaatggaatggaatagaatagaataaaaaggaattcactggacttgaaaggaatggaatgga

SEQ ID NO: 6699 - DNA, 131 bp, Protomyxzoa rheumatica
cgagtccattcgatgatgattccattcttttaaatccgatgatgattccattcaattacatttgacgactattccattcgagtaaattctatgattgcatttgataccattcgatgatgattccatttgag

SEQ ID NO: 6700 - DNA, 147 bp, Protomyxzoa rheumatica
aggaaacattgaatggaatcgaaaggaataaatcaaatggaatcgaatggaatcatcatcacaaggaattgaatgggaacatcgaatggaatcattatcgaatgaaataaaaaattatcatctaatgtaatcgaatgtaatcatcat

SEQ ID NO: 6701 - DNA, 128 bp, Protomyxzoa rheumatica
gtgggagataattgaatcatgggagtagttacccccatgctgctgttctcgtgataatgaatgagttctcatgagatctgatggttttataaggggtttccccttttgcttagctttcattcctctct

SEQ ID NO: 6702 - DNA, 122 bp, Protomyxzoa rheumatica
atacttcgtctcgttaaagcagttttgaaataatctttttgtagaatttcctattggatatttagagcgcttcgaggcctatggtagaaaattaaataacttcatagaaaaactagagagaa

SEQ ID NO: 6703 - DNA, 123 bp, Protomyxzoa rheumatica
tgcaagtgaatatttggagcaatttaagtgttcgctggaaatgggtatatcttcacataaaaactagacagaagggttctcataaacttatttgtattgcggcattcaactcacagagttgaa

SEQ ID NO: 6704 - DNA, 172 bp, Protomyxzoa rheumatica
aaaggttcaactgtgtgagttgaatgcgcccatcaaaatgtagtttctgagagtgcttctgtctagttgttacatgaaaatgtttccttttctaccgtaggccccaagcccttgaaatatccatttgcaaatttcacagactgtttcaaacctgctctctcaaaagaaaggt

SEQ ID NO: 6705 - DNA, 170 bp, Protomyxzoa rheumatica
aatctagacagaagcaatctgagaaacttctttgtgatgtaagcattcatctgacagagttaaacctttcttttgattgagcagtttggaaactctttttttgtagaacctgcacgtggacatttggagcactttgagtcctatgatggaaaaagaaatattctcacata

SEQ ID NO: 6706 - DNA, 151 bp, Protomyxzoa rheumatica
cagaattgaaacactccttttgtagaatctgcttgtggatatttacaactctttcaggaattcgttggcagctggtatcttcacaataaaaggagacccaagcatgctcaaaaagttctttgagatgtgtgccttaaactcacagacttca

SEQ ID NO: 6707 - DNA, 128 bp, Protomyxzoa rheumatica
gatagagtagttttgaaacactctttctgtaaaatctgcaagttgatgtctggagcactttgagtcctatggtagaaatggaattatcttcatataaaaactatgcagcagcattctcagaaactgct

SEQ ID NO: 6708 - DNA, 146 bp, Protomyxzoa rheumatica
gctctatcaaaaggaagtttcaaacctctgagttgaatgcacacacaatgaagaagtttctaaggatgcttctttctagtttatatgtgaagatactacggttcccaatgaaggcctcaaatcactccatatatccacttgcagat

SEQ ID NO: 6709 - DNA, 139 bp, Protomyxzoa rheumatica
atgattccattcgattccattcaatgatgattacatttgaatccattcaatgatttcactcgattctattcaatgactctgttcgatcccattggatgatttccttcgaatccatttcatgatccttccatttgattga

SEQ ID NO: 6710 - DNA, 123 bp, Protomyxzoa rheumatica
aacgaatggaattgaatgcaatcatcgaattgacttgaatggaatgaccatcaaatggaattgaatggaatcatcgaatgtacacgaatgcaatcatcgttgaatggatatgaatgaaatcat

SEQ ID NO: 6711 - DNA, 261 bp, Protomyxzoa rheumatica
aggatctcttacaagtgagcattgtactgtattttacttaagttttaagatactggttggaatagaagtgagacactgtctaatcttccctttttaagtatgtaaaatatgctattgttttcctacagaatttataatttccaagaacagattactgacactgagcaggaaacacttgttatttgtccttgaggtcacataattcacagaaagagttggggataaaaaggaacagagatggttaaggaaatgtttctgctt

SEQ ID NO: 6712 - DNA, 152 bp, Protomyxzoa rheumatica
ttgaatggaatcaaaaggaatcatcgaatggaattgaatggaatcatcgttgaatgtaatagaacggaatgacagaatggaatcaattggaatcatcgaatggaattgaaaggaatcagcatcgaatgcaatttaatggaatcaccatctaa

SEQ ID NO: 6713 - DNA, 128 bp, Protomyxzoa rheumatica
ctggaatcttatgtgagggacaaacattcagacctttgtagtagagatctggaatcctatataagggacacacactcagaacccaacagcagtgttttggaatcctaagtgagggacaaacattcaga

SEQ ID NO: 6714 - DNA, 322 bp, Protomyxzoa rheumatica
tgatctgtatgtttgtccctcacataggattccacaacactgctaggagggtctgaatgtttgtccttcacataggattccagaacactgcggctggggactaaatgttattccttcaaaaaggattccagaacacttctgctggggtctggatgttttctccctcacataggattgcttaaaaatgcttctaggctctaaatgtttgtccatcacagaggattccagaaccgttctgctggtttctgactgtttctcccacacataggtatccagaacactgctgcaggggtccgaatgtttatccatcacataggattaa

SEQ ID NO: 6715 - DNA, 261 bp, Protomyxzoa rheumatica
tagagcaggcagcctgagatttcaaaagggaggcaattctctaagaaataatatgagaggcacaagtgaattttaaatattctggtaactacattttaataaatacaccgggcatgcttccctgtgcctgtaggtcgaactattagggagactgaggtgggaggatcacttgagaccaggagtttgagaccagcccaggcagcatagagaaagccatctctacaaaaaaaaaaaaaaaaaaaaaaaaaaaaaaaaaaaaaa

SEQ ID NO: 6716 - DNA, 127 bp, Protomyxzoa rheumatica
ggaatcaaatggtatcatctttgaatggattcgaatggaatcatcgaaagcaatcgaatgcaatcatcgtatagactcattgaaaggaatcgactggaatcaccagtgaatggactcgaatggaatc

SEQ ID NO: 6717 - DNA, 180 bp, Protomyxzoa rheumatica
gagtccgaccccgccagtggcccttataaagacccaccagctttacgccttcatgaatatgcatgaacacccaagggccctgggtaacctgccctccgaagggcccagaaaccacagacacagggccttgtgtggtaggtgaaggtggggccagatcggatgggaaaggggggcttctgg

SEQ ID NO: 6718 - DNA, 126 bp, Protomyxzoa rheumatica
gctcctctgccatgggtactgcatcccataggagggtgtgaaagcactggtaatggtggtgggaatgcaccccagttcttacagtgcaccccaaccccagttcttactgttcaccccagttcttac

SEQ ID NO: 6719 - DNA, 174 bp, Protomyxzoa rheumatica
tcacagaggtgaagcttccttatgacagagcagttttgaaacactctttttgtagtgtttgcaagtggatattttgagcactttgaggcctagtgtagaaaaggagatatcttcacaggaaaagtagacagaaccattctcagaaactactttgtgatgtttgcattcaactca

SEQ ID NO: 6720 - DNA, 165 bp, Protomyxzoa rheumatica
agaaaagtttaactatgtgagatgaatgcacacttctgaaggagtttctcagaaagattctttctagttttcacctgaagacattttatttttcaccataggcctcaatgcgctactaaatatctcttcacagattctacaaaagacagtgtttccaaaatgctg

SEQ ID NO: 6721 - DNA, 129 bp, Protomyxzoa rheumatica
aatcttgcccaacccttctaatataaatgaacttctcaacaaccctttgatcttatgacttcctgcttctgtttcagagaatgcctttttgcattttattgaggacaataaacactttcatgtgaattt

SEQ ID NO: 6722 - DNA, 194 bp, Protomyxzoa rheumatica
actctttttgtagaatctgcaagtttatatttggagcacttttaggtatattgtggaaaaggaaataacttcatataaaaactacacagaagcattctgagaaactttttgttatgagtgcattcatcacacagagttgaacctttccttttgattgaacagttttgtaacactctttatgtagaaactgcaag

SEQ ID NO: 6723 - DNA, 140 bp, Protomyxzoa rheumatica
tggacacgaatttaatcatcattgaatggaatctgatcaaatcaacacatggaatcaaatggattcataatcgaaatgaatcaaatggaatcatctaatggactggaatgaaatcctcatcgaatggaaacgaatggaat

SEQ ID NO: 6724 - DNA, 142 bp, Protomyxzoa rheumatica
caattccactcaagtctattccattccattccaattcattccactccactgtgttccagtccactggacaccactccagttcactccatccattccattccattccattcaactccactccactccaccccattccattcca

SEQ ID NO: 6725 - DNA, 237 bp, Protomyxzoa rheumatica
aatggaatggaatttaatggaatggactctttggaatagaatccaatggaatggaatggaatcgaattgaatggaatggaatgaaatagagtcacatggaatggaatgcaatggaatggacttaaatggaatggaatggaattgagtcaaaaggaattgactgaaatggactctagtagaacagaatgggatggacacaaagggaatgatgtggaattgaacagactcgaatgaaat

SEQ ID NO: 6726 - DNA, 126 bp, Protomyxzoa rheumatica
atgcgggatccaggccccatcaatcacccaggagcttgtatagagtgcaggatccagacctgctcaatcagcctgcagttcaacagactccagagtgaacaggacacacgtcggagttccagaagc

SEQ ID NO: 6727 - DNA, 128 bp, Protomyxzoa rheumatica
atgtgtgcgttcatctcacagagttaaacctttcttttgattgaacagatttgaaactccctttttgaggaatctgcaagtggacatttggagctcgttgagtcctatggtggaaaaggaaatatctt

SEQ ID NO: 6728 - DNA, 123 bp, Protomyxzoa rheumatica
tactaatttgtgtacatttattttgtaacctgagaattagctgaattcatttactaaaactaacactatttaggaggagtctaggattttctaaggatataatcacttgatctgtaaacagtg

SEQ ID NO: 6729 - DNA, 441 bp, Protomyxzoa rheumatica
ttttgtagaatctgcaagtggatatttggagtgctttgagaccttccgtggacaagctaatgtcttcacataaaaactacactgaagcattctgagaaactactttgtgatgtgtgcattcatctcacagttttagacgtttcttttgattgagcagttttggaatactctttttgtagaatctgcaagtggatatttggagccctatgagccctatggtggaagaggaaatatcttcaaatacaaaatacacagaagcattcagagaaacttctttgtgatgagtgcattcatcacacagtgttgaacatttctttggattgagcagttttgaagcactattgtcatggaatctggaagtgcatatttggaggtcattggggcctattttggagaaggagatatcttcacataaaaactacacagaatcattctgagaaa

SEQ ID NO: 6730 - DNA, 249 bp, Protomyxzoa rheumatica
aggaaatatcttcacataaatactacacagaagcattctgagaaacgtattattgatgtgtgtattcaactcacagtgttgaacctctcttttcatcgagcagttttgaatctgtctttttgtagaatctgcaagtggacatttggagccctttctgacatatggaggaaaaggaaatatcttccaataaaaactacacagaagcattctcagaaacttctgtgtgacgtgtacattcatctcagagat

SEQ ID NO: 6731 - DNA, 124 bp, Protomyxzoa rheumatica
tcacataaaaactacacagaagcattctgacaaacttctctgttatgtgttcattcaactcacagtgttgaacgaattttttgattgagcagttttcagtctctccttttgtagtatctggaag

SEQ ID NO: 6732 - DNA, 200 bp, Protomyxzoa rheumatica
tcgaatgcacacaaaagcaataatcatctaatggaatctaatggaatcatcaaaaggaatcgaatggaatcaacatcgaatggactcgaatgaaaatattgaatgcaatcgaatggaatcgtaattgacgggaattgaatggaatcatcgaatggagtcgaatgaaatcatcagataatggaattgaatggaataatcga

SEQ ID NO: 6733 - DNA, 155 bp, Protomyxzoa rheumatica
gctgagcaagcattatgacctgagctccgtctcctatcagatcagctgcagcattcgattctcataggagtacgagccccaatgtggactccacatgtgagagatctaggttgcatgcacttatgagaatctaatgcctgatgattggaagtgga

SEQ ID NO: 6734 - DNA, 128 bp, Protomyxzoa rheumatica
aaggagtgtttcaaaactgctctatcaagagtaatcaactcagtgagttgaatgcagatatcacaatgtagtttctgagaatgcttctgtgtagtttttccaccaatatatttccttttctaccatag

SEQ ID NO: 6735 - DNA, 170 bp, Protomyxzoa rheumatica
aatctagaaagaagcaatctgagaaacttcttcatgatgtgtacattagtcttacagaattaaacctttctgttgattgcacagttttgaaactctctatttgtagaatttgcaaagggacatttgaagccctttgattcctatggaagaaaaggaagtatcttcacata

SEQ ID NO: 6736 - DNA, 133 bp, Protomyxzoa rheumatica
atctctgcactgatcacccaggaggtgtgactcttttctaagctctgcccagagggacattgggacatatatctgcactaatcgctgaggtgatgtaaaacttgtcaaggctttgcctacagtgggatttatg

SEQ ID NO: 6737 - DNA, 728 bp, Protomyxzoa rheumatica
agacagagcctagaaaagagttacatcacctgggtgatcagggcagttatttgacacaatgcctccatagacagatcctagacaagaattccatcacctgggttatcagtgcacaaatatgtcacaaatcgccctctaggcagagtatagagaagagtcccatcacctgggtgatcagtgcagtgatatttcacaaagcccctgtaggcagagtggtcaagagttacataacctaggtggtctgtgcagagctatgtcaaaatgcccctgtaggcagagcccagataaatgttacatcacctgggagatcagtgcagagatacgtcacaataccccctgtaggtggagcctagacaagagttagatcacctgggtgatcagtgcagtgatacgtcacaataacccctgtaggtggacctagacaatagttacatcacctgagtgatcagtacagaaatatgtcacaaagccgctgtaggccaagcctagacaagggttacatctcctgggtgatcagtgcagaaatatgtcagaaatccctgtaggccgacccaagacaagagttacatctcctgggtgatcagtgcaaagatatgtcacaaagccccctgcagacatatcccagaaaattggtacatcacctgggcgatcagtggagatatctgtcacaatcccctttaggcgcagcttagacaagcgttacatcagatgagtgatcagtgcagaca

SEQ ID NO: 6738 - DNA, 124 bp, Protomyxzoa rheumatica
tgtgagatgaatgcacacatcagaaagcagtttctcataatgattctttccagtttacacatgaagatatttcctttttcaccattggcttttttgtgctacttaaagtcacctcacagatttt

SEQ ID NO: 6739 - DNA, 155 bp, Protomyxzoa rheumatica
tggttttcctagcctctcagcttcatcaccccagctctatgtcagattttctccctttttcatggccttgaacctctgttaaaactctgtcaaaagagctgggacatttgtaatgcctgctatatttgttttctgtctttcagtgatcacctacc

SEQ ID NO: 6740 - DNA, 129 bp, Protomyxzoa rheumatica
ccttttttttgatagagcagctttgaaacactcttttggtaaaatctgcaggtggacatttgcatgtctttgtggcctacgttaaaaaacgtaatatattcaaaaataaactaggcagaagcattctca

SEQ ID NO: 6741 - DNA, 242 bp, Protomyxzoa rheumatica
attattccattacactccattccattccattcaattccattcgattgcattccaatcctttcgaatccaatccattccattccattccatatgattccactcaattccagtccattccattcgaatcctttccagtacactgcattaaattcctttccattcaattaaattccattttgttcagtccattacattccattgcgttgcattccaccccattcgattccattctattccattcg

SEQ ID NO: 6742 - DNA, 146 bp, Protomyxzoa rheumatica
cattcatgtcacagagttgaatctttcttttggttgagcagttttgaagaactctttttgtagaatccacaagtgtatatttggagtgatctgaggcctatactgaaaaaggaaatatcttcacatagaaactacacagaagcatt

SEQ ID NO: 6743 - DNA, 187 bp, Protomyxzoa rheumatica
tctgtctagcacctaagtgaagatattttcttttccaccgcaggcctcaaagcactccaaatgtccttttgcaaattctacaaaatgtgtttcaaaactgatcaaccaaaagaaaattccaaccctgtcagatgaatgcacacatcacaaagaagtttgtcagaatgattctgtctagtttttatgt

SEQ ID NO: 6744 - DNA, 130 bp, Protomyxzoa rheumatica
gaagatatttccttttacaccattggcctcaaagcactcacaaatattccattgcagaatccacaaaaagattgtttccacactgaccaatcaaaagaaatgttcaactgtgtgagatgaatgcacacat

SEQ ID NO: 6745 - DNA, 136 bp, Protomyxzoa rheumatica
tgcttcaactcacagagttgaactttcctttcgatacagcagttttgaaactctttttttgtagaaattccaagtggatatttagccccttttgaggcctatggttgaaaatgcaatatcttcatagaaaaacaag

SEQ ID NO: 6746 - DNA, 135 bp, Protomyxzoa rheumatica
catgactgacggcaacacatctaatccatcagacttccacaaattttacataatctttagaatatatatagtaataatatatctatacacataaaactttagaaaatatttaacatcatcaaaattgtgatttat

SEQ ID NO: 6747 - DNA, 133 bp, Protomyxzoa rheumatica
atgttggaaacactctttggagaatctgtgaaaagacatttcatggcccgttggggtttatgaggaaaaaccaaatatccccagatgaaaactacaaagaagctatctatgaaactgctttgggaagtgtgaa

SEQ ID NO: 6748 - DNA, 181 bp, Protomyxzoa rheumatica
ctgctgaatccaaagaaaggtttacttgtgtaagctgaaggcagacatcacaaaaatttctcagaaagcttctttctagtttttatctgaagatgttttctttttcaccattggcctcaatgctctctgaaatatcccattgcagattctataaaaacagtgctgcaaaactgctgaaccc

SEQ ID NO: 6749 - DNA, 124 bp, Protomyxzoa rheumatica
atcagtggaggaagtcactgcagatggtggtggaaatggcagagaactagaattagaagtagagactgaagatatgattgaattgctgcaatctcatgaacaaatttgaaggaatgaggaattg

SEQ ID NO: 6750 - DNA, 123 bp, Protomyxzoa rheumatica
aacgtgatttcttcatttacaactagacagaagaattctcggaaacttctttgtgatgtatgctttcaactaacagagttgaagcatcctctcgatagagcagttttgaaactctctttttgt

SEQ ID NO: 6751 - DNA, 178 bp, Protomyxzoa rheumatica
ccattcccttccactccactcctctccactctaatccactccattccattccattcctctccattctcttccattcctttctttggacaggatctcactctttcccccaggttggagtgcagtggcacaatctcagctcacattacgtttcaccattccattccattccattccattc

SEQ ID NO: 6752 - DNA, 152 bp, Protomyxzoa rheumatica
aatggaatcatcattgaatggactcgaatggactcatcatcgaaaggaatcgaatggaatcatttaatgtactcgaatggagtcatcattgaatggaattgaatggaatcatctaacggtctctaatggaatcatcatcgaatggaatcgaa

SEQ ID NO: 6753 - DNA, 186 bp, Protomyxzoa rheumatica
tccattcgagtccattaaacgattccattcgtttccattcgatgatgattccattcgagtccattcaatgatattcctttcggttccattcgataattcctttgttttccattcattgttttacgtcgatttttttgatggtgattccattcgattccattcgatggttcctttgtactccattct

SEQ ID NO: 6754 - DNA, 142 bp, Protomyxzoa rheumatica
aatctgagtagagacatttgggaacttattgaaacctatgaggaaaaacctcaatatccacagatagagattagagagaagctcttagtgaaacagctttatgaagcatagattggtctcaaagagttaaaactttcttttg

SEQ ID NO: 6755 - DNA, 148 bp, Protomyxzoa rheumatica
gagtcgaatggaatcatcaaatggactcaaatggaatcattgaactgacttgaatgaaatgatcgaatggactcaaatggaatcatcattttatggaattgaatggaatcctcgaatagattcaaatggaaacatcaaatgaaatcga

SEQ ID NO: 6756 - DNA, 133 bp, Protomyxzoa rheumatica
tctaatcctgagtctccgttcaagttttgccaattgcctcaatagcatcctttagtgcaaaaggatccaatctaggatcgctcatggcagttaatttcggttttcttcaatcgaggagttcctttgttttgga

SEQ ID NO: 6757 - DNA, 169 bp, Protomyxzoa rheumatica
tgaggcctatttggaaaaggaaatatcttcacaaaaaaaactatacagaagcatcctgagaaacttctttgtgagttgtgcattcaacacgcagagttgaacttatcttttctttgagcacttttgagttcctctttttatagaatctgcaattggatatttggagctc

SEQ ID NO: 6758 - DNA, 133 bp, Protomyxzoa rheumatica
catcgtagcattgttctgaaatcctatgtgagagacaaacattcagaacacagaaggagtgttctgaagtcctatgtgcgggataaaagttcagaccctcgtagctgtgtctggaatcctatgtgagggacaa

SEQ ID NO: 6759 - DNA, 161 bp, Protomyxzoa rheumatica
tgtgtgaagatatttcattttccaccataggtgtcaaggtgcttgaaaggtccactttcagattccacaaaaagtttatttcaaaactgcttaatcaaaagaaagttttaactctgtcagatgaatgcacaaattacaaataagtttctcagaattcttct

SEQ ID NO: 6760 - DNA, 124 bp, Protomyxzoa rheumatica
cgaatataatcaagagcaatcatcaaatggatttgaatagaatcatcgaatggactcaaatggaatcataatccaatggaatcaaatggatgcatcgaatggactcaaatggaatcatcatcaa

SEQ ID NO: 6761 - DNA, 124 bp, Protomyxzoa rheumatica
tgtgcattcagcttacagagttcaacttttgttttgatagagcagttttgaaacccgctttttgtgttatttgcaagtgtataattagggcgcattgagacctacggtagaaaaggatatatct

SEQ ID NO: 6762 - DNA, 127 bp, Protomyxzoa rheumatica
ttctgtgaagatatctccttttctaccataggaggcaaagcgctctaaatattcacttggaactccgacaaaaagagtgtttcgaaactgctctatcgaagggaaagttcaactctgagttcaatgc

SEQ ID NO: 6763 - DNA, 123 bp, Protomyxzoa rheumatica
aaaaggaaatatcttcacataaaaacaggacagaagcattctgaggaactactttgcgatgtgtgcatgtatctcatagagttaaaacttccttttgattgagcagtttggaaacactctttt

SEQ ID NO: 6764 - DNA, 177 bp, Protomyxzoa rheumatica
agaaaggttaaactctgtgagttaaacgcacacatcacaacgtagtttctgataatcattctgtctagtttttctttgaagatatggccttttctaccataggcctcaaatagcgcaaaatatccactaggaaattctaccaaacgagagtttcaaaactgctctatcaaagaaggt

SEQ ID NO: 6765 - DNA, 143 bp, Protomyxzoa rheumatica
ttatttgagtccattccattcgagtccattacgtatgggtggattccattccgttccattccattcgatgccattccgttctattctattccattagagtccattcctctcaagtccattccattccattccattcaatgcca

SEQ ID NO: 6766 - DNA, 125 bp, Protomyxzoa rheumatica
acctcagcgatcagtgcagagatacttcccaatatccctctaggcagatcttagacaagagtcgtatctcctgggtgatcagtgcaggtaagccacaatgcccccataggcagagcctagacaag

SEQ ID NO: 6767 - DNA, 125 bp, Protomyxzoa rheumatica
aatgtgtcgtttcaactcactatgtttaacctttcttttgatagagtagttttgaaacactttttgtagaatttgcaagtgtatatatagggtgctttgaggccaacggtagaaaaggaaatatc

SEQ ID NO: 6768 - DNA, 162 bp, Protomyxzoa rheumatica
atcttgcccccaaaaatttactggagaacaggcaccctagaggcccaacaaactttcaaacaggaagcatgcttaaatctgcagttgtcattcattcctccagttccacaactatttactgaacagtggaagaaatcataataacggaggtggctgtagttg

SEQ ID NO: 6769 - DNA, 127 bp, Protomyxzoa rheumatica
tctgtgtagttttaaagtgaagatatttccttttacaccagaggctgcaaatggctccaaatatccacttgcaggttctacaaaaagagagtttcaaaacttcttaatcaaacgataggttcaactc

SEQ ID NO: 6770 - DNA, 126 bp, Protomyxzoa rheumatica
ctgatcacccaggtgatgtaacacttgtctaggctctgcctactggaggcattgtgatgtatctccgcactgatcacccaggtgatttcacttttgtcaaggatatggccagagagacattgtgac

SEQ ID NO: 6771 - DNA, 232 bp, Protomyxzoa rheumatica
gattccaatccaatccattccattaaactccattccactccactccactccactcgactccactccactcctctccactccactccattcgattctaatccattccattcctttcctttatttcgagtggatctcactctgtcacccagactggagtgcagtggcacaatcttagctcacatttcagttcacgtttccattccattccattccattccattccattccattc

SEQ ID NO: 6772 - DNA, 137 bp, Protomyxzoa rheumatica
ttccattccatttgattccattgcactcctttcctctctattccattcgagtacattccattctattccattcgaatccattgcattccatttcattccatttgagccaattcaattccatttcattccattccttt

SEQ ID NO: 6773 - DNA, 161 bp, Protomyxzoa rheumatica
tacatcacctgcgtgatcactgcaagatgcactgcaggattactgcaggatgcactgctgctggatgagctcctggcgagcctggtgtttctgcatcaggtgcaacctttcctagaaatggaggccccaggggagctagagtccttggaagaggccgcctc

SEQ ID NO: 6774 - DNA, 154 bp, Protomyxzoa rheumatica
attccattccattcgagttaattctatccccttatgtcccattcctttcgagtccattccattccatagcattccattccattcggttgcactccattcctttcctttcgagtccgtttcattccattcgaatccaatccattccattcgagtg

SEQ ID NO: 6775 - DNA, 151 bp, Protomyxzoa rheumatica
tggtctgaatgtttgtccctcactcaggattacagaacactgctgttggattcagagtgcttgtccctcaagtacaattgcagagcactgctacttgggtttaagtgcttgtccctcacataggattccagaacactgctacaagggtctg

SEQ ID NO: 6776 - DNA, 160 bp, Protomyxzoa rheumatica
ccttcaactcacaaagttgaactttcctttcgatagaccagctttgaaatactctttttgttgaaattccaagtggatatttagagcggtttgaggcctatggtaaaaaaggaaatatcttcatagaaaaccggacagaatccttctctgaaactacttt

SEQ ID NO: 6777 - DNA, 140 bp, Protomyxzoa rheumatica
gactagcttttatgtgaagatacttccttttcaaccatcggcctcaaagtgctctaaatgtccacttgaagatactacaaaaagatagtttcaatactgctcaatcaaaagaaagacttaattctgtgagataaaggcac

SEQ ID NO: 6778 - DNA, 238 bp, Protomyxzoa rheumatica
atcgaatggcatcagatggattcatcatcaaatggaattgaatgaaatcatcgaatggactctaatggaatcatcatcgaattgaatcaaagggaataatgaaatggactctaatggaatcatcattgaatggagtggaatggaaacattatcgaatggaatcatcattgaatggtatcaaatggaatcatcgaatggaatagaaaggcatcatcattgaatggaatcgaatagaaat

SEQ ID NO: 6779 - DNA, 140 bp, Protomyxzoa rheumatica
aagcacttcaaatgaacacttgcagattgtagaaagagtgtttcaaatctgctctttctaaagaagtgttcaacagtctgagttgtattcacacatcacaatgcagattctgagaatgcctgtctagtttttatttgaag

SEQ ID NO: 6780 - DNA, 152 bp, Protomyxzoa rheumatica
aattaaatttttcgtttgattcagcaggttgaaaacacttttttggagaatctgcaaagggacatttgggagcacattgaggcatatggaaaaaaagtgaatattccctgataaagactaggaaatatccatccatgacaatgtttgtggtg

SEQ ID NO: 6781 - DNA, 211 bp, Protomyxzoa rheumatica
ctccctatgtggccaaggccagtctcaaactcctgggcacaagcgatcctcctgtcttggcctcccaaagtgctatgattatagctgtgagatactacgcccggcaagggaaagtactttattattattttttccagcgggaggggtgggcaggcagggaggggctgagaaagtactttaaagcaatgtttgttcttagttgacttcagtg

SEQ ID NO: 6782 - DNA, 144 bp, Protomyxzoa rheumatica
ggccacaaagtgctcccagatgtccccttggaggttctgcacaatactgcttccaacctgctgaatgaaaagaaagctttaattctgtgagatgaatccacacatcaaaagcagtatcacagataacttctttttagtttttat

SEQ ID NO: 6783 - DNA, 151 bp, Protomyxzoa rheumatica
cttcaactcacagacttgaacctttcttttcatagagcagtgttgaaacatgctttctgtaggatccgcaggtgttcatttggagcgctttgttgcctatggtggaaaaataaatatcttcacataaaaactagacagaagcattctgaga

SEQ ID NO: 6784 - DNA, 130 bp, Protomyxzoa rheumatica
tccattcaatgatgattccattcgattccattcgatcatgagtccatttgattccatttgatgattactccgttcagttccatttaatgaggattccattcagttccatttgatgatgaatcctttggat

SEQ ID NO: 6785 - DNA, 145 bp, Protomyxzoa rheumatica
cacattaaaactagacagaagaattctgagaaacttctttatgatgtgtgcgttcatctcacagagttgaacgtctcaattgattcagcattttggaaacactcttttcgtggaatcttcaagtggacatttggagcgctttgag

SEQ ID NO: 6786 - DNA, 125 bp, Protomyxzoa rheumatica
ttttatgtgaaaatatttcctattgccccatgggcctcagttggctcaaaaatacccctctgcacattctacaaaatgactgcttccaaactactgaatcaatagaaacgttcaactctgttaga

SEQ ID NO: 6787 - DNA, 125 bp, Protomyxzoa rheumatica
tcacaatgtccactgtaggcagagcacagaaaagagttgcatcacctgggtgatcagtgcagggatatgtcaaaatgtcccctgtagacaaaccctaggtaagagttacatcacctttgtcatca

SEQ ID NO: 6788 - DNA, 129 bp, Protomyxzoa rheumatica
cacaacgccctctgcaggcagagactagaaaagacttatatcacctgggtgatctttgcagaaatatgtcacaatgccccctgtaggcagtacatagagaagagttgcatcacttgggtgatcagtgca

SEQ ID NO: 6789 - DNA, 133 bp, Protomyxzoa rheumatica
agtgtacatttagagcgctatgaggcctatggtaaaaaaggaaatctcttctcctaaatactagaaagaagtattttcagaatctaatatgtgacgtttttattcaactcacagagatgaacattcctcttga

SEQ ID NO: 6790 - DNA, 209 bp, Protomyxzoa rheumatica
tgcattccattccattccatttcatttcattcgatttcattccgtttcattccattaaactccattccattcatctccattccattcaattcaattccatttgattagattccattccattcgattccattccatccgtgtccattccactgctttgcattccttttgagtccattctattcgaaaccattccagtccattccattcca

SEQ ID NO: 6791 - DNA, 134 bp, Protomyxzoa rheumatica
tgtaactcttatctaggctctgcttacagggggcatcgtgagatatctctgcactgatcacgcaggtactgtaactcttgtctaggctctgctacaggggcattttaatatatcactgcactgatcactgagat

SEQ ID NO: 6792 - DNA, 125 bp, Protomyxzoa rheumatica
aattgaaacgaatgtaattatcatgaaattgaagtggacggactcataatcgaatggattcgaaaggagtcatcgaatgaaattgattgaaaacatcatcaaatggaatccaatggaatcattga

SEQ ID NO: 6793 - DNA, 149 bp, Protomyxzoa rheumatica
atcaaaaggaaggtttaactctgtgagttgagtgcagacatcacaaagaagtttctgggaatactactgtcgtgtttttatatgaagatactcccgtttccaaagaaggccgcaaagcgctccaaatatttacttgcagactttacaaa

SEQ ID NO: 6794 - DNA, 136 bp, Protomyxzoa rheumatica
gtttactatcccaaatagatagtttactatctatttacaaataggtagtttttacaaatagatagtttactatctgccttgcatttgggatagttttctatctgtagtgcatttgggatagtttactatctgcctt

SEQ ID NO: 6795 - DNA, 146 bp, Protomyxzoa rheumatica
ttttatgtgaagatatttccttttcaaccatacaccagaaagtactccaaatgtctgcttgcggcttctacaaaaagagagtttccaaaatgcacaatcaaaaaaaaaggtttaattatgtaagttgaatgcacatatctcaaaga

SEQ ID NO: 6796 - DNA, 139 bp, Protomyxzoa rheumatica
tttttatgtgaagatatttccttttccaccataggcctcatagtgctccagatggccatttgcagattctacaaaaagagagtttcagaactgctcaatcaaaagaaagttttaactgcgtgaggtgaatgcacacata

SEQ ID NO: 6797 - DNA, 122 bp, Protomyxzoa rheumatica
ttcttttgattgagcagtttggaaccactctttttgtcaaatctgcaagtggacatttggagcacttagcggccaatggaagaaaaggcaatatcgtcacataaaatctagacagaagcaat

SEQ ID NO: 6798 - DNA, 216 bp, Protomyxzoa rheumatica
gttctgcaatcctatgtgagggagaaacactctgaaaaccgtaagtgtgttttggaatcctacatgagggccaaacaatcaaaccctcatagctgtgttccggaatcctatgtgaggggcaaacactcagacaatcgtagcagttttctggaatcctttgtgagggacaagcattcattccctcgtagcggtgttcgggaaccctgtatgagggac

SEQ ID NO: 6799 - DNA, 125 bp, Protomyxzoa rheumatica
atcacctgggtggtcagtgtagagatatgtcacaatgtccccataggcagagcctacacaaagtcccatcaggtgggtgataagggcagagatatgtcacaaagcccctgtaggcagagcctaga

SEQ ID NO: 6800 - DNA, 139 bp, Protomyxzoa rheumatica
aagccaaatggaggagagttgtgtcaggagacagaaagagtaattactaaggaaataatttaagaccccaaattcagctatgtcaaaagcctatctacctctagacacttcagtgtagacaggctgggggttttatgca

SEQ ID NO: 6801 - DNA, 261 bp, Protomyxzoa rheumatica
ccagaacacttctgctggggtctgaatgtttctccctcatgtaggattccaaaacagtcctgctgtcttctgagtgtttgtccctcaaatggggttcgagaacactgctatgagggtctgaattattctccctcacataggattccagaacacggctatgagggtctgaatgtttgtccctcacatatgattcctgaatactcctgctgtggtctgaaagtttccctcaaataggattccagaacagtgctgctgggttct

SEQ ID NO: 6802 - DNA, 221 bp, Protomyxzoa rheumatica
ggatgacacctaagccccagcacgactggccaaacttgagatggtcatctcaacactgatgctgtgccagcaattagccccatttgtacatttttaaaaactttttggcaattgccaagaattgttcaccttccctcctcattgaattaaagaaacttcttgtctcatggatactcagaataccaatcaaggtaacagacggctttttttaaccaaggaca

SEQ ID NO: 6803 - DNA, 176 bp, Protomyxzoa rheumatica
agagaagtttgtcaaaatgcttctgtctagtttttatgagaagatagtacttttccaccattggccccaaagggctccaaatagcaactgcagatcctacaaaaagtgtataaaaaatgctaaatcaatagaaagtttcaactccgtgagatgtatgcacacatcagaaagaagtt

SEQ ID NO: 6804 - DNA, 270 bp, Protomyxzoa rheumatica
ttcagacaattgtagcagtgttctagagtcctaagtgagggaagaacattcagaccctcgtatcactgttctggatcctaagtgagggacaaacattcagaccacagcagagtgttctggaatccacagtgagggacaaactttcagaccttctttgcagtgttctggaatcctacagagtgacaaacattcagacaatcgtaacagtgttctggaatcctgtgtgaaggaaaaaccttcagactcaagcagcagtgttctggaattcaa

SEQ ID NO: 6805 - DNA, 215 bp, Protomyxzoa rheumatica
ttgtgatgtttgcattcaactcatagagttgaacattcccattcatacagcaggtttgagacactctttgtatactatgtggaaatggatatttggcgcgctttgaggcctatggtgaagaagggaatatcttcccaaaaagactagacgaaagcattctcacagtcttgtttgccatgtgtgtactcaactaacagagttgaacctatcttttg

SEQ ID NO: 6806 - DNA, 305 bp, Protomyxzoa rheumatica
ccttacaatccattacattccagtctgttctattctagtccattccattccggtgcattacattcaaatccattccattcgattccattccatttgtttccattccatactattgaattccattcgattccattattttcgaataaatttcattcgagaccattactttcaagtgcgttctatttgattccattgcattacagtccattatgtttggtccattccattccattccattcgatgccattccattctagtccattccattcctgtccattccattcgagcagattccattctattcc

SEQ ID NO: 6807 - DNA, 153 bp, Protomyxzoa rheumatica
caaaatcctgtctacaagctacttcgatgcttaggagacagaaaaatggccatctcctgtacctgccagttgctgacccaagaaaaactggctattttcaaggaataatgatgaaaaaatagcaactactaaaacagccactattgttatatg

SEQ ID NO: 6808 - DNA, 149 bp, Protomyxzoa rheumatica
caaatggactcatcgaatggacttcaatggaatcattgaatggactcaaatggaatcttcgaatggactcgattggaatcatcattgaatggtatcgaatagaataattgaatttactcgaatggaataatcatcaaatggaatcgaat

SEQ ID NO: 6809 - DNA, 147 bp, Protomyxzoa rheumatica
acagtgtttccaacctcctgaatcaaaagaaaggtttaactcttttgtaaaatccacacatcacaaagcagctttatagatacttcattctaatttttatctttggatattcaggttttcttcttaggcctcaatgggctcccaaat

SEQ ID NO: 6810 - DNA, 151 bp, Protomyxzoa rheumatica
caaaaggaagggtctcgaatggaatttatttgaaaagaattgaatcgaatcgcaggcaatagtatggaatggaatcgaagggaatggaatcaaatggaatagaccagaatggcatggactggattacaatggactcgaatgtaatggattg

SEQ ID NO: 6811 - DNA, 139 bp, Protomyxzoa rheumatica
ggaatcattgaaaggaatccaatgaaatcatcatcaaatagaactgaatggaatcatcgagtggactcgaatggaatcatcatcaaatggactcgaatggaatcaccatcgaatggaatcgaatggtgttatcgaatga

SEQ ID NO: 6812 - DNA, 142 bp, Protomyxzoa rheumatica
gtttaaaagagcctggaactttctcctcatggtcttgcttcctctctcaccatgtgacactctggctccccttcaccttccgctgtgattgtaagcttcttgcagccctcactagaaacagatgccaacactacgcttcatg

SEQ ID NO: 6813 - DNA, 127 bp, Protomyxzoa rheumatica
tatgtgaggaaaatacattcagaacacagcagaagagttctggagtcccttgtgggggacaaaaattcaggccctcgtaacagtgctctggaattctaagtgaggacaaacatttagacccacatag

SEQ ID NO: 6814 - DNA, 287 bp, Protomyxzoa rheumatica
cctcacataggattccagaacactgctgcttgagtctgaaagttttttcttcacacaggattccagaacactgctatgattgtctgaatgtttgtcactccataggattccagaacactgcaacgagggtctgaaagtttgtccctcactctggatttcagaacactctgctgtggtctgaatatttgttcctcacttcggatccagaacagtgatacgagggtctgaatgttcgtccctcatgtaggattccccaacactgctacaattgtctgaatgtttgtccc

SEQ ID NO: 6815 - DNA, 150 bp, Protomyxzoa rheumatica
tatcttcacataaaaactacacagaatcattctgagaaacatctttgtcatgagaacattcatctcacagagttgaacctatcttttcaaagagcagctttgaatctctctttttgtagaaactgaaagaagatatttgtagtcctttgc

SEQ ID NO: 6816 - DNA, 143 bp, Protomyxzoa rheumatica
gcagtttcgaaacgctctttttgcagtatctgccagtgtatattttgagttctttgaagtctctgttgtaaatgggaatatattcacagaaaaactagacagaagcattcacagaaacttacttgtcatgcacacattcaact

SEQ ID NO: 6817 - DNA, 138 bp, Protomyxzoa rheumatica
aaactgctcaatcaaaagaaagattcaactctgtgagatgaatgcacaaatcacaaagtagtttctcagaattcttctgtctaaatttaatataaagattttcttttccaccaaaggcctcaaagcccaccaaatgtt

SEQ ID NO: 6818 - DNA, 126 bp, Protomyxzoa rheumatica
ctagaggccttaaagccctccaaatatacacttgcagattctccaaaaagagagtttcaaaacttctcaatcaaaagaaagctttaacactctgaggtgaatgcacacatcacaaagaagtttctc

SEQ ID NO: 6819 - DNA, 156 bp, Protomyxzoa rheumatica
gcattcatctcacagagttgaacgtttcttttcattgtgcagtttggaaagtctttttcttgaatctgcaaagggatatttcagagctgtttgaggactgtggttaaaaaggaaatacttcacttaaaaactagacagaagaattctcagaaactt

SEQ ID NO: 6820 - DNA, 123 bp, Protomyxzoa rheumatica
cttcagagaaaaactagaaggaagctttctgagaaactgcttcatgatgtatgctttcatctcacaaaatcaaacctttcttttggtggagcagtttgtaaacactgtatttgtagaatctgc

SEQ ID NO: 6821 - DNA, 162 bp, Protomyxzoa rheumatica
tcgaatgcaatcatcatcgaaaggaatcaaatggaattttcttcaaatgggatcgaatagaatcatcatggattagaatcacatgggatcatcgaatgaaagagaaaggaatcatcatcaaaaagaatcgaaataaaacagagaatggaatccaatggaatc

SEQ ID NO: 6822 - DNA, 131 bp, Protomyxzoa rheumatica
tgaatgcacacatcacagagcagtttcagagagtgcttccttgtagtttttatctggggatattcacttatttgcagtaggccttaatgagttctaaagtctccctttgaagattctacaaaaactgtgtt

SEQ ID NO: 6823 - DNA, 174 bp, Protomyxzoa rheumatica
ctatctgagaaacagctttgtgatgtgagcattcacttcacagaattaacccattcttttctttcagctgtttggaagcagtgtttttacagaatctgcaaagggatatttcagtgagcattgaggtcaatggtgaaaaaggaaacatcttcagttaaaaactagaaagaagct

SEQ ID NO: 6824 - DNA, 198 bp, Protomyxzoa rheumatica
tgccccttcaggcagagcgtaagcgagagttacatcacctagaagatcagtgcagggatttatcacaaggccccatataggcagagcctgggcaagagttgcatcacctcggtgatcaatgcagtgatatgtcactatgcaccgttggcagaacctagtcaggcgttacatcagctgggtgatcagtacagagatatg

SEQ ID NO: 6825 - DNA, 196 bp, Protomyxzoa rheumatica
cagtttcacagatagcttctttctagttttatctgaagatattcagattctccccataggcttcaattggcacccaactgttccttcgcacattctccaaaatgaagttttccaacctgctgaattaaaaaatggttaaatctgtgagtttaatccacatattaaaaagcagttcaatgatagcttcttgttatct

SEQ ID NO: 6826 - DNA, 137 bp, Protomyxzoa rheumatica
aagaaatttctgagaatgcttctgtctactttgcatgtgaagatattttttttccatcttgttcctcaaagcgctcaaaatgaacacgtgcaggttctacaaaagaagagtttcacaactattctatcaaaagaaaa

SEQ ID NO: 6827 - DNA, 218 bp, Protomyxzoa rheumatica
gcagtgttctggaatcctatgtgagggagaaaggctcagaatccagcaacactgttctgcaatcctatgggagggacaaacattcacaccagagcaggagtgttctggaatcccatgagaggggaaaacattccgactccagcagcagtgtccttgaatgctatgtgagggacaaacattcagaccaaagcaggagtgttctggagtcctatgtgagg

SEQ ID NO: 6828 - DNA, 132 bp, Protomyxzoa rheumatica
tctattccatgatgattcctttcgattccatttgctgatgattcctttcgattccattaggtgatgattccattcaagtccattagatgtttccttttgtttccactcgaagttgattccattcgagtccat

SEQ ID NO: 6829 - DNA, 189 bp, Protomyxzoa rheumatica
tatctcagatctattttcatcaaggttaacctcttctccaggtagcattctctttctctatatgtaacataaaggtcatttattactctaaaattacattctaccagtttatcaaccaaggaaatagtgcctctttcctaatctttccagcaaacctctcaggtaggatgcccattatctcagctctag

SEQ ID NO: 6830 - DNA, 135 bp, Protomyxzoa rheumatica
tgtgatgtttgaattcatctcacagacttgaatctttttattgatttagcatattggaaacagtctttttgtagaatctccaaagggatatttttgtacacttggaggccaatagtgagaaaggaaatatcttca

SEQ ID NO: 6831 - DNA, 169 bp, Protomyxzoa rheumatica
attccattccattcttttatttcgtcaggaactcactccgtcacccaggctggagtgcagtggcacaatgtcagcccacatttcatttcaacgtgccattcgattccattccattccattccattccattccacaccactccacgaaactccactctactccactccac

SEQ ID NO: 6832 - DNA, 348 bp, Protomyxzoa rheumatica
ctataattatgttttcatatataagatgtataatatgtattatatattatatacgttatgtaatatacataatatatataagatgacataggataaatattatgtattatgacatataatatatatgaggttacatattacatataaagcatattccataacatatagtatatatcatatataattttttttcagacagagtcttgtcctgttgcacaggatggagtacaatggcgccatctttcctcactgcaacatctgtctcacgggttcaagcgatcgtcctccctcagcctcccaggtagctgggactacaccacactgggactacaccagctgccaccatgc

SEQ ID NO: 6833 - DNA, 145 bp, Protomyxzoa rheumatica
agacgaacagtcttctgttagaagaggatgccatctatgactctcatagctagagagaaatcaatgcctggcttcaaagctttaaaggacaggctgactctcttattaggggctaatcactttaatgtggctggtcactctaagt

SEQ ID NO: 6834 - DNA, 128 bp, Protomyxzoa rheumatica
aatgtattttcctaaaataggattccagaacaatgctacgagagtctgaatgcgtttccaacccgtaggattcaagaagaccccagttgtggtctcaatgattgtccctcacataggattccagaaca

SEQ ID NO: 6835 - DNA, 135 bp, Protomyxzoa rheumatica
taaaaactagacagaagctttctcagaaactcctttgtgaggtatgtgttcaattaacagagttgaacctttcttttgttagagcagttatgaaacactgctcttgtagaatctgcttgtggatatttggagctc

SEQ ID NO: 6836 - DNA, 165 bp, Protomyxzoa rheumatica
aagtacaactctgtgagttgaatgcacacaacacaaataagtttctgacaatgcttctgcctagtttttatttgaagatatttccatttccaccgtaggcctcaaagcactccaaataatcactggcagatactacaaaaagagtgtttcaaaactgctctatca

SEQ ID NO: 6837 - DNA, 128 bp, Protomyxzoa rheumatica
ttctgcactgcagcttgtggcagggggaaattgttgtattgtggtaactgggtatatgtccctcacgtacgaatccagaacactgccatgtgggtctaatatttggccctcacataggattccagaac

SEQ ID NO: 6838 - DNA, 134 bp, Protomyxzoa rheumatica
gtttccaaactactgtatctaaagaaaagtttaacttcgtgagatgaatctacaagtcacaaagcagtttcacagataacttctttgtagtttttatttcgggatgttcagtttttctccataggcctcaatgg

SEQ ID NO: 6839 - DNA, 138 bp, Protomyxzoa rheumatica
aagatgaaggggaagcaggcacgtcctatgtgtctggagcaggagaaagtgggtggtgaagagggaggttctatacacttttaacaaccagatctcgtgagaatttactaacaggagaacagcaaggggcaagtctgc

SEQ ID NO: 6840 - DNA, 122 bp, Protomyxzoa rheumatica
tccaccatagaccttcaagcgctccaaatgtacacttgcagaatctacaaaaagtgtgtttaaaactcctcaatgtaaacaaaggttcagctctgtgagatgaatggacacatcagaaagaa

SEQ ID NO: 6841 - DNA, 141 bp, Protomyxzoa rheumatica
caaatatccacttgcaaattctacaaaaagtgtttttcaaaactgctcaatgaaaaggaatgttcacctctctgagttgaaagcaaaacacacaaagaagattctgagaatgcttctgtctggtttttatgtgaagatatt

SEQ ID NO: 6842 - DNA, 278 bp, Protomyxzoa rheumatica
ctctgcctacgggggctttgtgacacagctctgcattgatcaccctggtgagggaactcttgtctacgctcttcctaaaggaggctttattacttatacctgctctgataacctaggtgatgtaacacttgtctagactctgcctacactggaattctcacatatctctgcaatgatcacccagttgatgtaactcctgtctaggttcagcctacaggagcgttttgacatatctctgcactgatcacccaggtgatggactcttgtcttagatctgc

SEQ ID NO: 6843 - DNA, 137 bp, Protomyxzoa rheumatica
ttgtgatgtgtgtactcaactaaaagagttgagactatcttttgagagagctgttttgaaacaccctttttgtagaacttgcaagtgcataatttgatagctttcatggtttgactggaaacgggaatatcttcaca

SEQ ID NO: 6844 - DNA, 208 bp, Protomyxzoa rheumatica
tagaaaaagagattagcaatgtaagatgacgtggacacaggtgtggacatagaataagtcaagttagataagtatttcaaagttgcccaaggctagagaaggatcagtgtgcaagatgcaaaaagaaaggacactataaagatgaatgtccagaaggcaatgaaagaaatggccaaggccgcaagacaaagaggccattggccaaagg

SEQ ID NO: 6845 - DNA, 123 bp, Protomyxzoa rheumatica
gtttttcctagtgaggctttggaaaatcggtaggtcctaaatcttctctttgtatgagggtcttagaggaataccactctctcttatattatataaagcccttaaatggtacaaagagtgtta

SEQ ID NO: 6846 - DNA, 181 bp, Protomyxzoa rheumatica
ctaaattcatacattaagtgtttcatctgttgggtgctaaatgtaagtagtactgtgttttcatagcaaattgcacttggttgttgttggtgcattggaaagtgattgactttctcttttaatcttgtattctgtaatcttgcttttcagttccaggagggtttttttttcggtttggtcc

SEQ ID NO: 6847 - DNA, 241 bp, Protomyxzoa rheumatica
aagtcgaaaaatagtttctgaggaactgctttgtgttctgtgcattcatctcacaaagttacacctttctttagacttagcagtttggaaaaactgattttttccattctgggaatggacatttcagagctcattcaggccaatgacaaaaaatcgaatatcccaggatgaaaagtagaaggaagctatctgagaaacctttatgtgatatgtaaactcatctcactgagttaaacctttc

SEQ ID NO: 6848 - DNA, 123 bp, Protomyxzoa rheumatica
ctctgagcccagctcggaatatgacttgcctaataattgaagtccttgtggcttagaattccccttaagttctcttagagtccaatagcacgtcaactcatgatggcaagacttgcaaaaact

SEQ ID NO: 6849 - DNA, 122 bp, Protomyxzoa rheumatica
catgaatgcacacatcacaaagaagtttataagactgcttctgtctacattttttgtggagacatttccttttctactgcataccacaatgcgctccaaatgtccacttgcagattctacaa

SEQ ID NO: 6850 - DNA, 176 bp, Protomyxzoa rheumatica
ggaatggaattgaacagaatggaatggaatggaatggagtggaatgcagttgaatgaaatggaatcgaatggaatggtatctaatggaacggaattgaattcaataaattggaatgtaatggcctcgaaattaatggaattgaaagtaatggaatgaaaggcaatcaaatggaatc

SEQ ID NO: 6851 - DNA, 154 bp, Protomyxzoa rheumatica
cctttccattccgttccactccactccactccagtccacactgttcagttacattttttcccattgcattttgttcaaccccattacactccactccattccactccactccacttcacttcaccacattcattcgattcctttcaatgccatt

SEQ ID NO: 6852 - DNA, 134 bp, Protomyxzoa rheumatica
tggaatggaatggaagggaatggaatcgaatgaaatggaaatgtatggagtcgaatggaatggaacggaataactcaaaaggaatagaatgcaatggactcaagcagaatggaatggactcgaaagcaatagaa

SEQ ID NO: 6853 - DNA, 124 bp, Protomyxzoa rheumatica
tggaatggactccaatagaaaggacaaggaatggtcttttctgttccttctcgaatgcaatttattcgaatggaatggatgagaatggaatgcaacagtatggaatggaatcgcatcaaatgga

SEQ ID NO: 6854 - DNA, 167 bp, Protomyxzoa rheumatica
aactctgtgagatgaaggcacacatcacaaataagtttttcagattgtttttctctagaatttatgtcaagatatttccttttctaccataagccacaaagcactgcaaatgtcaactttcacattctacaaaaactgtttccatactgctcaatcaaaggaaaggt

SEQ ID NO: 6855 - DNA, 248 bp, Protomyxzoa rheumatica
agaacactcctgcaattgtctgagtgtttgtccctcacataggattgctgaacactcctgctgtggtctaaatgtttgttcctaacctaaaattttagaacactcctgctgtcatctgaatgtttgtccctcacataagattccacaagaatgctacgagtgtctgaatgtttatcccacacttaggatttcagagcaccccagtattggtctgaaagattgtctctctcataggattccagaacact

SEQ ID NO: 6856 - DNA, 238 bp, Protomyxzoa rheumatica
tcaattcttttttggttatcacaaagctatctggaaatgtaacgtctgccatttataaaattttgtagggttaatagaactttacttgaaaggaggctggcaataggcatcatgacttcaagcactgccagtgaagttgcggattttgaagtggtaatcacatcttgttactgggattataaatttgtacaagctttatcaattgtgattaaacaatatataccaaaattataaatgg

SEQ ID NO: 6857 - DNA, 132 bp, Protomyxzoa rheumatica
agttgaatgtacacatcacaaagtactttctgagaatgcttttgtctagtttttatgtgaagatatgtgcttttctaccacaggcctcaaagcactccacatacgcacttacagattctacaaaaagagtat

SEQ ID NO: 6858 - DNA, 152 bp, Protomyxzoa rheumatica
gatctgggcagcggggcactgaagaagtgagccactccggctctcacacgccctgcgaggggacaaggaaacctttcctgttttatgaggataataatgaaagcaaagctgtagcgtggcatctaccaaagcacagagctcagtaaatactt

SEQ ID NO: 6859 - DNA, 122 bp, Protomyxzoa rheumatica
caggtgatgcaactcttctgtatgctctgcctacagggggaattttgacatatctctgcactgatcatcctggtgatgtaacttttttctagtctctgcctacagagggcgttgtgacatca

SEQ ID NO: 6860 - DNA, 159 bp, Protomyxzoa rheumatica
ctcttccgatctcctttggattccattccgttagattccattacattcgaggccattccattccagtatactgcattcaggtccattctgtttgggtccattacattcgagtccattctactcgcgtccattacatttcattccattccactccactcc

SEQ ID NO: 6861 - DNA, 230 bp, Protomyxzoa rheumatica
cctgcttttctcagtgaagcttgtctgcccctggattttatacccagccgacacccacagttcatgtctactgacttaataggcaatgtttattaggtagccaatgtttattttgtttttgactactcactgaactcaacactttaggtactcaacactgatgtcctgatgtcctttttgtgctctggtgtcagatccaggatcctccgtgtcatttagcatcgtgtctc

SEQ ID NO: 6862 - DNA, 289 bp, Protomyxzoa rheumatica
attccattcgatgatggttccattcggttccattcaatgatgattccattcgattgcattcgatgaagaattcaatcgagtctattcatagattccattagattccattcgatgattccgtttgattccattcaatgatgattgcattcgattccattctatggttccattcgtttccatttgatgatgattccattcgtgcccattcaatgattccattctatttcattcaatgatgactccattcatgtccattcaatgattccattcaagtccatttgatgattcc

SEQ ID NO: 6863 - DNA, 148 bp, Protomyxzoa rheumatica
acaatgcccccataggcagagcctagacaagagttacatagcccggttgatctctgcagagtgatgtcagaacaccctctgtaggtagagactagaaaagagttacaacacctgggtgatcagtgcagagatatgtcacaatgccccc

SEQ ID NO: 6864 - DNA, 122 bp, Protomyxzoa rheumatica
gtgagtttagtttttggaatgttttgtgaaacagtctctttatcagatgtgagttttaacagtttttggagtgctttgtataacagccactttatcagatgcgagttttaagagtattcgga

SEQ ID NO: 6865 - DNA, 160 bp, Protomyxzoa rheumatica
gagttgaaccttccttttgatagagcaatttggaaacactctttttgttcaatctgcaagttggtatttttagtggagagaagccttcgttggaaacgggaatatgttcacatacaaactggacagaagcattccaagaaacttccttgtgatgtgtgca

SEQ ID NO: 6866 - DNA, 231 bp, Protomyxzoa rheumatica
agaagagttacataacctaggagatctgtgcggagctatgtcaaaacgccccagtaggcagagcctagataaatgtttaatcacctggatgatcagtgcagagatacgtcacaataccccctgtatgtggaacctagacaggagttacatcacctgggtgatcagtgcagagatacgtcacaatacctcatgtaggtggagcctaggcaagagttgcatcacctgggtgat

SEQ ID NO: 6867 - DNA, 203 bp, Protomyxzoa rheumatica
gaaaggaatgaaatagaatcaaacagattggaatggaaatgtttcgaatggaatggactggaatgaaatggaatcgaacaaaatggaatggaattgaatggagtggaaaggaatggagtgaattggaatggactggaaaagattcgaatggaatggactggaatggagaggcaatgtatggaatggaatggagtggaatggaa

SEQ ID NO: 6868 - DNA, 149 bp, Protomyxzoa rheumatica
tcccaaagttctaggattacaggcatgagccatgtcgcctgaccatttttttattttatattttctcttttttagagatggggatcgcactatgttgaccaagctggccttgaactcctggcctaaagtgatcttcccatctcagtctc

SEQ ID NO: 6869 - DNA, 137 bp, Protomyxzoa rheumatica
atcactaagggagagatcacaacaggagagatcacaatgggagagatcccaaaggagagatcactacaggagagatcactatgggagagatcactacaggagagatcactacgggagagatcactatgggagagatc

SEQ ID NO: 6870 - DNA, 144 bp, Protomyxzoa rheumatica
cctcaaagcactccaaatatccacttgcagattctacaaagcaagtgtttcaaatctgctcagtcataagataggttcaaatctctgatatgaaggcacatatcacgaagaagtttctcagtatgggtctctgtagtgtttagt

SEQ ID NO: 6871 - DNA, 130 bp, Protomyxzoa rheumatica
ttcctcagcaatttcttgtctgaaaaagatattatttctcctttgcttatgaagcttagtttggctggatataacattatgggttggaaattctattctttaacaatgttgaacattggcctccaatctc

SEQ ID NO: 6872 - DNA, 157 bp, Protomyxzoa rheumatica
gttcaacatttgttttgtttgagtattttggaaacagtctttttgaaggatctgcagagggatattcgtgagcagtttgagggctctggagaaaaaggaaatattcacataaaaaccggacaaaagcattgtgagaaacttctttgtgatgtataca

SEQ ID NO: 6873 - DNA, 195 bp, Protomyxzoa rheumatica
tttttgtagaatctgcaaagggatgtttgggagcacattgaggcctatggtgtaaaataaattatcttcaggtaaaaaatagaaagaagctctctgagaaactgtttgtgatgtgtgcatttgtctcacagaggtaaacatttcttttgattcagcagtttggaaacactgtttatgtccattcctgtggatggc

SEQ ID NO: 6874 - DNA, 140 bp, Protomyxzoa rheumatica
tcagttcgagtccatttgacgcttcccttttggtccatttgatgaattctttcgagtccaactgatgattccattcaattccattctatgatgattgtgtatgattccattcgatgatgattctttcaggaacatttgat

SEQ ID NO: 6875 - DNA, 178 bp, Protomyxzoa rheumatica
gaaagagctgccaaagactttacaagataagaaacaaatcaagaagtgaggagtaggttttagaaacaatattagttaaagaaaccaagataacaaacaatattgcctaattgtgagtgaggcaatatgtcgacatgaactgctgacgcatgccaaaacttggatggacatcatggac

SEQ ID NO: 6876 - DNA, 123 bp, Protomyxzoa rheumatica
aagatatttcctatttcaccataggcctcaaacagctcacaaatatacctttgcagattctacaaaatgacttgttcccaaactactcaatgaaaagaaaagattgaatctgtgagatgaaag

SEQ ID NO: 6877 - DNA, 159 bp, Protomyxzoa rheumatica
gtttccaatgaatgggaaaaaaatggatgatagataaagaaaattttatgcgtatatatatatacacacacaccgcacacacacaaacacacacacgcacacacacacgcacacgcacacgcacacacacgcacacacactccttccttctgcgagtta

SEQ ID NO: 6878 - DNA, 257 bp, Protomyxzoa rheumatica
ttctgacaaactacttttgatgtgaacattcaactcacatacttgaacctatcatttgattgagcagttttgaatctatgtttttgtagaatctgcatgtggatatgaggagccctttgtgacctttggaggaaaatgaaatatcttcaaataaatctacacagaagcattctgagaaacttctttgtgatttgtgcattcatctcacagagctgatcctatcttatgattgagcagttttgaaacactctctttgt

SEQ ID NO: 6879 - DNA, 128 bp, Protomyxzoa rheumatica
agctttgcagcctacggtgtgaaaggaaatatcctcacataaaaactagacagaagcatcctgacaaacttctttggatgtgttcattcatctcagagagttgaaccttactttcgattaagcagttt

SEQ ID NO: 6880 - DNA, 207 bp, Protomyxzoa rheumatica
tctgcaattgtacatttggagcgctttgaggtctatggtcgaaaagcaaatatcttcacagaaaaactagacagaagcattttgaaaaacttctttgtgacgtttgcattcatctcactgacttgaacctttcttttgattgagcagttttgaaaaagtattttatagaatctgcatgtggacatttggagcactttgaggcctatg

SEQ ID NO: 6881 - DNA, 122 bp, Protomyxzoa rheumatica
cagaaactactttgttatgtgtgtgttcaactcacagagcttagcctgccttttgatagagcagttttgaaactctctgtgtgaaaagtctgcaggtggatatttggagcgctttgaggcct

SEQ ID NO: 6882 - DNA, 132 bp, Protomyxzoa rheumatica
ccatttgatctcagactactgtgctagcaatcagcaagactccgtgggcataggaccctccaatccaggagcaggatataatctcctggtgcgcctttttttaagaccatcggaaaagtgcagtattcgggt

SEQ ID NO: 6883 - DNA, 153 bp, Protomyxzoa rheumatica
ggaatggattggaatagaatggagtgtcatggaatggaatggaatggactggaagggaatggagtggagtggaatgcaatggattagaatgaaatcgaaaggaacgaagtggaatggaatggagtggagtggagtttaatggaagggaaagaa

SEQ ID NO: 6884 - DNA, 126 bp, Protomyxzoa rheumatica
tattagttgtttttactcatcatgtgggtgtttgttgtttttactcatcatgtgggtgtatattcgttgtttttactcgtcatatgggagtatattagttgtttttactcatgtgggtgtatattc

SEQ ID NO: 6885 - DNA, 187 bp, Protomyxzoa rheumatica
agaactacgcagaagcattctgagaaacttctttgtgatgagtgcattcatctcagagagttgaacccttcctttgattgatcaattttgcaacactctttttgtagaatctggaattggatatttggagggctttgaggcctatggtggaaaaagaaatatcttcacataaaaactagacagaagc

SEQ ID NO: 6886 - DNA, 185 bp, Protomyxzoa rheumatica
gttttgtagaatctgcttgtggatatttgtagctcttggaagaattcattgtaaaagggatatcttcacatacacacaagtcagaagcattctcagaaacttctttgtgattgtgaattgaactcacagagttgatccttccttctgagagagccgttttgaaacaatctttttgaagtatcttc

SEQ ID NO: 6887 - DNA, 166 bp, Protomyxzoa rheumatica
acactctttttgtagaatctgctaaggcaaattccagagcactttgaggcttggtaggaaaaccgaatatgcccagataaaaactagaaagaaggtatctgtgacactgctttttgttgtgtggattcatttcacaacattcaacttttcttttgattcagcagat

SEQ ID NO: 6888 - DNA, 131 bp, Protomyxzoa rheumatica
agtattgaaacaatctttttgtagaatccacaagtggatatttggagtgttttgagacctattttggaaaacaaaatatcttaacataaaaactacacaaaagtaccctgataaacttatttgtgatgtgt

SEQ ID NO: 6889 - DNA, 126 bp, Protomyxzoa rheumatica
ccctgccccgactcgacctcctcccaaccacgcgtcctaaagctcctccagcatagcccggtattcctccacgctgaggagtgcttccaccgaggcagcctcttccaaggcctccagctcccccag

SEQ ID NO: 6890 - DNA, 130 bp, Protomyxzoa rheumatica
ctctcatagtcaccattcccatgaccatagtcatgggaatcttgctcgtgttacagggaagcactgtccaacatcatatgtgacaggttctcatcgtcaccatcatcatgggaatcttgtgcatgttaca

SEQ ID NO: 6891 - DNA, 185 bp, Protomyxzoa rheumatica
cgtggcacaaaaaaatatacacaggtaaaaactagaagaagcaatatgtgaaactgctttgtgatggatgcattcatctctgagatttcaaactttattttgatttagcaggtttgaaacactccttttggagaatctgtgaaggaacatttatgagccttttgtggtctgtgtggaaaaacagg

SEQ ID NO: 6892 - DNA, 131 bp, Protomyxzoa rheumatica
cagaatgttttcatgtagtttttttgtgaagatatttccttttccacaataggcaccaaagtactccagatatccaatttcagattctaccaacagagagtttcaaaactgctcaatcaaaagataggttc

SEQ ID NO: 6893 - DNA, 220 bp, Protomyxzoa rheumatica
aaacactctttttgtggaatctgcaagtaaatatttgtacttttttgaggccttcattggaaacgggatctcttcatataaagcttgacagaagaattcccagaaacttctctgtgatgtgtgcatttaactctcagtgttcaaccttccttttgatagaagtgggttgaaattttcatttgtagaatttccaagtgaatattgagagcggtttcaggcc

SEQ ID NO: 6894 - DNA, 125 bp, Protomyxzoa rheumatica
caggtttgaaacacactttttgtagtatgtgcaagtggatatttcgagcactttgtcgcctattgtgaaaaaggaaatatcttccaataaaaaaaagacagaagcattctcagaaacttgtttgt

SEQ ID NO: 6895 - DNA, 339 bp, Protomyxzoa rheumatica
tctagaatctgcaaagggatattcctgagcggtttgaggcctatgttgaaaaaggaaacatcttcatataaaactagacagaagctttctgagaaaaatatttatgatgtgtgcatacatctcacagagttgagcctttctattgattcagcagtttggaaacagtctttttgtagaatctgcagagggatgttcaggatccctttaatgacaactttgaaaaagggaatatcttcacataaaaagtagacagtagctttcagagaaacttctttgtgatacgtgcattctacccacagacttgagattttcttttgattgggcagtttggaaacagtc

SEQ ID NO: 6896 - DNA, 134 bp, Protomyxzoa rheumatica
aaacagtctttttgtagaatttgcaaaaaaaaatttgtgagccctaaatggcccatgatgatataggagatatcatcacataaaaaatagacagaagatttctgagagactactttgtgatgtttgcttccgtg

SEQ ID NO: 6897 - DNA, 180 bp, Protomyxzoa rheumatica
accaatgtcattgagcttttccctatgttttcttatggtagttttatagttttgggtcttacactgaagtctttaatgcgtttggaattgatttttgtatatggtgtgagttaggggtctagtgtcattctacatgtgaatatccagccttcccaatgctatttattgaagactgtcctt

SEQ ID NO: 6898 - DNA, 140 bp, Protomyxzoa rheumatica
agagcagttttgaaacactctttttgtagaatctgcaagttgatattttgacctctttgtgtcctttgttggagaagggaatatcttcacataaaaacctgacagaagcattctcagaaacttccttgtgatgtgtgtac

SEQ ID NO: 6899 - DNA, 135 bp, Protomyxzoa rheumatica
gaatggaatcattgaatgaaatccaatggaatcatcatcaaatagaaacgaaaggaatcgttgaatggacttgaatggaatcatcgtcaaatggaatcttatggaatcatcaaatggactcgtatggattcatca

SEQ ID NO: 6900 - DNA, 159 bp, Protomyxzoa rheumatica
gactatggtgaaaaagaaaatatcttcacataaaacaaaaaagacgcattctcagaaacttctttgtgatgtttcctttcaactcacagaattgaacatacctgttcatagagcagttctgaaacactcttttcgtagaatctgcaagtggatatttgg

SEQ ID NO: 6901 - DNA, 154 bp, Protomyxzoa rheumatica
gagagttgaaccttccttttggtagaacagttttgaaacgctctttttctagaatctgcaagtggaaattcggagtgctttgagcctatggtagaaaaggaaatatcttcataaaaaaacttgacagaatcattctcagaaactactttgtgat

SEQ ID NO: 6902 - DNA, 136 bp, Protomyxzoa rheumatica
attccattccattcgatatctttccattatgctccattacattctattcctttcaattccattcacttccaatacatttggttccattccattcgactccgttccatttgagtacattccattccattccattcca

SEQ ID NO: 6903 - DNA, 129 bp, Protomyxzoa rheumatica
tctgtctaggttttatgtgaagatattttgttttccatcataggcctcaaagctctcaaaatgaacacttgcagatgttaccaaaagaatgtttcaaaactgctctgtcaaaagaaaggttcaactctg

SEQ ID NO: 6904 - DNA, 188 bp, Protomyxzoa rheumatica
aagataggttcaaacccgtgagatgaatgcacacatcacaaagaagtttttcagaatggttctgtgtattttttatgtgaagctatttgcttttcagtggtaagcctcaaaaccctgcaaatactgacttacagattctacaagaacagtgtttgaaaactgccgaatcaaaagaaagttggaatttt

SEQ ID NO: 6905 - DNA, 183 bp, Protomyxzoa rheumatica
ctacaaaaagagtgtttcaaaagtgctctgtcaaaaggaaggttcacttctgtgagttgagtacagacatcacaaaggagtctgtgagaatacttctgtctgctttttatctgaagatatgcctgtttccaaagaaaacctctaatccctccaattattcaggtgcagactttacaaacagag

SEQ ID NO: 6906 - DNA, 167 bp, Protomyxzoa rheumatica
acatgctttcttcactaagcttgatgatttctacctcttgatttgaagtgacagatgtgaacacttcttttcacttgaatacatagtggccactgcagactggaggggcctaatttcattgttgtatcttggggaacggggggctggaagagagaaatggagatagg

SEQ ID NO: 6907 - DNA, 146 bp, Protomyxzoa rheumatica
attctatttgattccatttgataattctgttcgattccatttgatgttgactccattcgagtccatttgatgattattccatttgattctattccatgattccatttggttccatttgatgatgattccactcgagatcattcgat

SEQ ID NO: 6908 - DNA, 216 bp, Protomyxzoa rheumatica
gattcattgaatggaatcagatggaatcatcaaatggacttgaatggaatcattgaatggactcaaatggaatcatcatcgaatggaatttaatataatcttcgaatggacatgaatggaatcatcatcaaatggaactgaataaaatcttcgaatgcactcgaatggaaacatcatagaatccaatcgaatggaatcatcatcgaatagaatcaa

SEQ ID NO: 6909 - DNA, 202 bp, Protomyxzoa rheumatica
gattttgtttctgcaactattgagatgaccatggttttgcttattgtgttggtatagtgtattatattaaataattgttggctgctatccaaccttgtatacttgggatgaatccaacttggtcatgaggtataattatttttacatgttgctgtattctgtttgcttgcattttattttattttatttatgttattttttg

SEQ ID NO: 6910 - DNA, 245 bp, Protomyxzoa rheumatica
attgcattgcattccattacattccattccactttatttcactccactccactttactccattccattccactccttcccattccatttgactccattccactccactacactccattttcctccactccattccattccattccattacctttcactccattgcatttcatccctttctttcgaaagtatatcactgtgtcacacaggctggagtgcagtggcacaatctcagcgcacattaca

SEQ ID NO: 6911 - DNA, 129 bp, Protomyxzoa rheumatica
attccatgcgattccattggattatgactccttttgtttccattcgatgattattcctttcgagtccatttgttgttgattctttcgattgtgttcgatgatgattccatttgattccattcgatgatg

SEQ ID NO: 6912 - DNA, 256 bp, Protomyxzoa rheumatica
ttccattccattcgattccattccatacttttccattacattcgactctgttctattcgaataaattccattcgaagccaattctttcaagtccattttttttagtcccttccattcgagtccattacatttgggtcaattgcattccattcctttccattccatttgatgccattccattcgattctattccattcgagtccattcctttccagtccattccattcgttgccattcgattcgattctattccatt

SEQ ID NO: 6913 - DNA, 180 bp, Protomyxzoa rheumatica
cactgggctcaaaaggaatggaaaggaatggattcgaatggaattgaatggaatggattcaaatgtaattgcatggaatgaaatggacttgaatgcaatggattggagtggactcgaatggaatggtatggactagaacagaatagagtggaatggacttcaattgaatgcaatggaatt

SEQ ID NO: 6914 - DNA, 128 bp, Protomyxzoa rheumatica
attccattccattccattgcattacattccataccttttgggttgattcctttccaatccattccactacgtacattcccactccattccgttacattccattcgggttgattccattacattccatt

SEQ ID NO: 6915 - DNA, 151 bp, Protomyxzoa rheumatica
tgaaaacactccttttgcagaatctatgaatgaacatttgggagcccattgaggtgtatggggaaaaactggatatcctaagatagaaactccaaagaatttatgtgggaaactgttgtgacgtgtggattcaggtcacagagttaaacca

SEQ ID NO: 6916 - DNA, 138 bp, Protomyxzoa rheumatica
caaaaagcttctttcaagtttttatccgaagatatttcctttttcacaatgggcctcaatgcactcacaactatacatttgcaggttctccaaaacagtgtttccaaattgctcaaacaaaagaaaggtttaactctg

SEQ ID NO: 6917 - DNA, 127 bp, Protomyxzoa rheumatica
aatatattccattcaatgattccattggattccatttgatgatggttctattcgattccattcgaagatgattaatttcaagtggattcgatgatgacttcaatcgagtccattcaaagattccatt

SEQ ID NO: 6918 - DNA, 155 bp, Protomyxzoa rheumatica
atatgtcacaatacaccttgtaagcagagcctagacaagagtaacatcacctgggtgatcagtgaatagatatgtggcaaggcccctttaggtagatcttagataatagttacatcacctgagtgatcagtgcagagatgtgtcacaatgcccct

SEQ ID NO: 6919 - DNA, 135 bp, Protomyxzoa rheumatica
acaaacacacgtgcatacacacctggacacatcaaactgctgaaaactaaagacagagaaaaattggaaaatttccagaggggaaaaacataaagaggaactaaagtaagacttagagtagacttctcatcagac

SEQ ID NO: 6920 - DNA, 126 bp, Protomyxzoa rheumatica
agccttagcaagcggagcacccctccatggagtattgacattctgttacttcagttatactgaaaactagtagaaggtatgagatgttgcactcaaccattatgagcaagaaaatccattcaatct

SEQ ID NO: 6921 - DNA, 139 bp, Protomyxzoa rheumatica
tttcttttgattgaggagtttggaaaaagtcttttagtagaatcttcaaagggatatttgtgagcagtttgaagccaaatatgaaaaaggaaacatttaacataaatactagacagaagctttctgacaaactcctctg

SEQ ID NO: 6922 - DNA, 134 bp, Protomyxzoa rheumatica
agaaacattttcagaaacaggtttctgttgtgtgcattcaactcacggtattgaacatttcttttgatagagcagtgatggaacacacatttggagaatctgcaagtgttcatttggagcgctttgttgtcaat

SEQ ID NO: 6923 - DNA, 144 bp, Protomyxzoa rheumatica
aagtgtacattcatctcacagtgtttcaccattcttttgattgagcagtttgcaaacacaatgtttgtaaaatctgtgaagggatatatggatttgcatggaggcctgtggtgaagaaagaaatatcttccgatactaactaga

SEQ ID NO: 6924 - DNA, 188 bp, Protomyxzoa rheumatica
cgtgtagccagagcctagactaaatttactgcacctgggagatcagtgcagagatacgtcacaatatccccagtaggcagatactaggcaagagttggataacctcgggatcattgcagagataggtctcaatccccctgtgggcacagcctagacaagagtttcatcatctcgcttaacagtgcaga

SEQ ID NO: 6925 - DNA, 134 bp, Protomyxzoa rheumatica
aaaaaaaaaaacaaaaaaaaaaccagtatggctttggtgactcgagggaaagggtgggggggtgagggataaaatactatatattgggtacagagtacactgctcaggtgttgcgtgcaccaaaatctcagata

SEQ ID NO: 6926 - DNA, 264 bp, Protomyxzoa rheumatica
gacagactaacatttagaccctgcagcagtgttctagaaacttatatgatggacatgcatgtagaccccagcagcagtgttctggaatcctatgtgattgacaaatgttcagacccccgcagcagtgttctggaatcgtatgtgatttgcaatcattcagaccctcatagcagtgctctggaattctgtgtgagggacaagcattcagacccttttagaagttttctggaatactatgtgagggacaaccattcagaccatggc

SEQ ID NO: 6927 - DNA, 132 bp, Protomyxzoa rheumatica
cctgacttttgggtatggggcagggccctctctggaataggggtcttatgacctacagtctaacaaggtaggtgagatcatttctttatggccagtttttaaacagaaaggtgggggaggtgttagaatgat

SEQ ID NO: 6928 - DNA, 134 bp, Protomyxzoa rheumatica
attggataaccccagataaaaactagaaagacatatatgtaatattgctttgtgatgtgtatattcatctcacagagttaatatttttttactcagctggttgaaaacaatctttttggagaatctgtgaagga

SEQ ID NO: 6929 - DNA, 131 bp, Protomyxzoa rheumatica
agaatgtttcaaatctcctgaatcaaaacaaaggtttaactgtgtaagaggaatgcacacatcacaaagcaatttcacgaatgacttctttctggtttttatctggggatattcagtttttctccagaggc

SEQ ID NO: 6930 - DNA, 163 bp, Protomyxzoa rheumatica
atttgaatggaatggaatggacttgaatggaacggaatggcatgtaacagaatctaacaaaatggaacggaattgaatggaaaggaatggactcgaatggaatggaatcgaatggaatgcactcgagtgcaatggaatcgaatggaatgtaatagaatggaat

SEQ ID NO: 6931 - DNA, 154 bp, Protomyxzoa rheumatica
tggagtggagtggagtggaatggaatggaatggagattagtggagtggagtggactggaatggagttttgtggaatggaatggattggagttgagtgtactggaggggagtgggatagaatggaatggaatttaatggaatggagtggagtgga

SEQ ID NO: 6932 - DNA, 132 bp, Protomyxzoa rheumatica
tgtgagatgaatgcacacatcacaaagtggtttctcagatagcttcctttaggtttttgtcctgggatattcattttttcgccattggccacagtgagctcccaaatgtgccttcacagattctacaaaaac

SEQ ID NO: 6933 - DNA, 134 bp, Protomyxzoa rheumatica
aatggaaacaaatggaatcatccaatggaataaaatgtaatcttcattgaattgaacccaatggaatcactaaatggactcgaatggaatcattgatttgactcaaatggaatcatcatcgaatggaatagaat

SEQ ID NO: 6934 - DNA, 125 bp, Protomyxzoa rheumatica
aaactccattccactccatttcattccactccactgcattccattacattttaatccattcctttccttcctttaatttcgactgtatctcattctctcacccagacttcagtgcagtggcacaa

SEQ ID NO: 6935 - DNA, 142 bp, Protomyxzoa rheumatica
tctagaatctgcaaagtgatatttaggaaccctctaagtactagaatgaaaaagggaatatcttcacataaaaaaataggcagaatctttctgagaaacttctttctgatgtgtgcattcaactcacagacttgaactttcc

SEQ ID NO: 6936 - DNA, 144 bp, Protomyxzoa rheumatica
ttactcaaatggaatggaatggaatggaatttacttgaatggaatggaatggaaaggactgaaatgtaactgcatgaaatggaacggagttgacttgaacggaatagaattaaggagactcgaatggaatgaaatggtatgaaa

SEQ ID NO: 6937 - DNA, 151 bp, Protomyxzoa rheumatica
ctccacatccttaccagcatttgttatttcctgtctatttcatagccatcctaacaggtgtgagatgatcctgtggttttgatttgcaaattcctgatgattaatgacattgagcaccttttcatgtacctgctggaattttgaaaaaaag

SEQ ID NO: 6938 - DNA, 141 bp, Protomyxzoa rheumatica
ttgcagattctacaaaaagagtgtttgcaaactgctctatgaagagtaatgttcaactctgtgaattcaatgcaaatatcacaaagtagtttatgacaattcttctgtccagtttatatgtgaagatatttccttttctac

SEQ ID NO: 6939 - DNA, 133 bp, Protomyxzoa rheumatica
cgaaggccacaaagatgcacaaatatccactttcagacacttccaaaagagtgttttaaaactgctctatcaagaggaattttcaactcagtgagtttaatgcaaataccacaaattagtttctgacaatgct

SEQ ID NO: 6940 - DNA, 123 bp, Protomyxzoa rheumatica
gaatcatcatcaaatagaatcgaatgggatcatcgaatgaaacagaatggaatcatcatcaaaaggaatgaaagtaaaacgaagaatggaatacaacagactcattgaatggaattgaatgga

SEQ ID NO: 6941 - DNA, 124 bp, Protomyxzoa rheumatica
caattggaaatgaagggaatcatcgaatgggaatgaaaggagtcatcaaatggaattgagtggaatcatcaaatggaatcatcgaatggacacgaatcatatcatcattgaatggaatcgaatg

SEQ ID NO: 6942 - DNA, 207 bp, Protomyxzoa rheumatica
tcctagcactgcaaatatccacttgcagatcacactaaaagagtatttccaaactgcatagtcaaaagaaaggtgaaatgaacacacacgttgcaaaaagtgtctcagactccttctgtgtagtttttatgtgaagatattttcttttttacaataggcttcaaagctctccaaagatccacttgcagattctacaaaagagtgttt

SEQ ID NO: 6943 - DNA, 228 bp, Protomyxzoa rheumatica
taattatttgacgtaggacttagttattctatgtaggacttccggttctatgttaaaatggaaccattagaatgggcataatataggcttgcattggtgtttgtgcatttgaaggagcaaacacctgttttcatttttataaactggctttagtaggcaaagatcttaatctattgggtctcaaggctgatgagatctttactgggtttgcagtaaaaaggcttgcag

SEQ ID NO: 6944 - DNA, 140 bp, Protomyxzoa rheumatica
catgattccatttgagtccttttgatcattccacgttattccattcgatgactataccattcaaatccatttgatgactccatttgattccattcgatgataccatttgagtacattcgataattccatttgattccatt

SEQ ID NO: 6945 - DNA, 130 bp, Protomyxzoa rheumatica
cattcaactcacagagttgaacaaaccttttctaagagcagctttgaaacactttttccgtagaatctgctaatgtatacttggactgctttgaggccttcattagaaacgggaatatcttcacataaaa

SEQ ID NO: 6946 - DNA, 160 bp, Protomyxzoa rheumatica
agttttgaaacagtctttttgtaggatctgcatgtgttcatttggagctctttgaagcctaaggtggaaaagtaaatatattcacgtaaaacctacaccaaagcactctcaggaacttcattaagatgtatgcattcaaataacagttgaatctgtcttt

SEQ ID NO: 6947 - DNA, 160 bp, Protomyxzoa rheumatica
aaaggaaatatcttcagagaagaagtaaacagaaactctctgagaaactgctttttgatgagttcatacatctcacagaggtaaaattttcttttcactgagcagtttggaaagactgtttttgtagaatctgtgaagggatatttggcagtgcattgag

SEQ ID NO: 6948 - DNA, 214 bp, Protomyxzoa rheumatica
tatttgaagatatttcctttgcctccatggaccgcaaagggctccaaacatccacttgcaggttcctgaaaaagagagatccgaaactgctcaatcaacagataggttcaaggctgtgagttgaatggacacatcacaaagaagtttctcagaaggcttcagtgcagtttttatgtgaaggtatttccctttccaccataagccacaaaggtct

SEQ ID NO: 6949 - DNA, 133 bp, Protomyxzoa rheumatica
gaacactcctaccggggtcttaatttttgtccctcacataggattcaacaacactgttgctggggtctcaaagtttgtccctcaggtaggattccagaacactgctgctggggtctaaaagtttgtctgtcac

SEQ ID NO: 6950 - DNA, 123 bp, Protomyxzoa rheumatica
ctctagctctctttgccggcctcctggctagaactacgctcattgcacaccccggctgacgtgcaagggagcctgctggcctctctgtttccttgtccctccgtgaaattccggctgaggctc

SEQ ID NO: 6951 - DNA, 146 bp, Protomyxzoa rheumatica
ggggcattgtgtcaaatgtctgcactgatcacccaggtgatgtacttcttttctaggctctgtctacagggatttctgtgacatataactgcactaatcacctaggtgatgtaagccttgtatgggctttgcttacagaaggcttt

SEQ ID NO: 6952 - DNA, 126 bp, Protomyxzoa rheumatica
ggaaaagaatgaaatggaattgaatggactcaatagtaatgcaatggaaaagaatgtaatggaaagtaatggcctcgaagagaatgtaatggaatgaaatgtgctgaaatggaattgaatggaagg

SEQ ID NO: 6953 - DNA, 148 bp, Protomyxzoa rheumatica
cattccattccattcgattgtattgcagtctattccattccactgcatttctttcgattccgttccactgcattccatttcactcgagtccattgcattccatttcatttgagcccattgcattccattccacttgagtcaattccat

SEQ ID NO: 6954 - DNA, 122 bp, Protomyxzoa rheumatica
cacagtatcccacatggtattccacacaatattttacacgttattccacacgttatcttacacaatatttcactaggttgccacatggtattccacaaaatattccacacagtattccacat

SEQ ID NO: 6955 - DNA, 140 bp, Protomyxzoa rheumatica
tagttttcatacgaagatatttccttttctaccataggcctagatgtgcttgaaatctgctcttgcaaactctacaaaaagagtgtttcaaatctgctctctgtaaaggaaggttcaactctctgagttgaatacacaca

SEQ ID NO: 6956 - DNA, 146 bp, Protomyxzoa rheumatica
aaatggagtcactcatgcagtgtttccaagttgctaaactaagttgttatctgaccttcaagaaatcaggagagagggataacagtcatttttcaaaacaggccagtttcaatctttaattggcatgataatgatcataagttccc

SEQ ID NO: 6957 - DNA, 138 bp, Protomyxzoa rheumatica
atgcaatcattgactgggcttcaatggaatcatcatggaatggaattgaatgtaatcatcgaatggactcgaatgaaatcatcatcaaatggaatcagatgacttgaaatggacttgaatggaatcatctaatggaca

SEQ ID NO: 6958 - DNA, 123 bp, Protomyxzoa rheumatica
agaagtttctcagattgcttctgtctagattttatgtgaacatatttcgttttctaccataagctacaaatcgcttcacacgtccacttgcaaattctactaaaggaatgtttccaaaatgct

SEQ ID NO: 6959 - DNA, 145 bp, Protomyxzoa rheumatica
atgggcctcaatgttctccaaaatatccctttgcagaatctacaaaacacagtttgccaactgctgtacaaaaataaagctttgatctgcgatatgaatacgcacatcacaaatcagtttttcagatagcttccttctagttttt

SEQ ID NO: 6960 - DNA, 130 bp, Protomyxzoa rheumatica
tgttcctttcacaaaatacttccctgtagcatgtgatgctgtttgacagcattttatctccagtaaaacttctttcaaaattggagtaaaccctttcaaaccctgctgctgctttatcaactaggtttat

SEQ ID NO: 6961 - DNA, 128 bp, Protomyxzoa rheumatica
ttccattcgatgattccattcaattccatttcttgatgataccgttcgattccatttgaatattccatttgattctattcgaggattccatacgattccatcttattatgattctattcgagtccatt

SEQ ID NO: 6962 - DNA, 192 bp, Protomyxzoa rheumatica
atgcttctgtttagtttttatttgaagatatttccttttcagcaataggcctcaaagctctccacatatccacttgcagattctgtataaagggagattcagagctgctcattcaaaagataggttcgactctgtgttttgaatatacacctcacaacgaagtttctcagaatgcttctgtgtagtttctat

SEQ ID NO: 6963 - DNA, 133 bp, Protomyxzoa rheumatica
gtggtgtgtccactcatctcacagagttaaaaccttcttttaattcagcagcataaaaatactgtttttatagaaactgcaaagggacatttgggagcctgtagaggtttaggaaaaaaatgaatatcccagt

SEQ ID NO: 6964 - DNA, 138 bp, Protomyxzoa rheumatica
ccattccattccattccattccattccattctattccagtgaataccatttcattcgactccattccaatcgagtccattccatgcaagtccctttgactcaagtccattccattcaagtccattccattcgagtcca

SEQ ID NO: 6965 - DNA, 142 bp, Protomyxzoa rheumatica
agttttgaaactctctttttgtagaatctgcaagtgcatatatggacttttttgaggccttcatttgaaacgggatttctacatataaaacctggcagaagaattctccaaaacttctttgtgatgtgtgcatttaactcac

SEQ ID NO: 6966 - DNA, 253 bp, Protomyxzoa rheumatica
atcactgctgctgagttctgagtgtttctccctcccataggattccagaacattcctgttgttgtctgaatgtttgtccctcagttaggatgacagaacactgctattggtttctgagtgtctgtccctcacgtatgaggccagaacactgctacgtgagtctaaatgtttgtttctcacgtaggattccagaacactgctgctgtggtctgagtgtttgttcctcacataggattccaggacactccagttg

SEQ ID NO: 6967 - DNA, 125 bp, Protomyxzoa rheumatica
gattgttccattcgattctattcggtgattccattcgatttcatttcataattattccattcgaggccgttcaatgattccattcaattctattcaataatgattccattcgggtccattcaatg

SEQ ID NO: 6968 - DNA, 130 bp, Protomyxzoa rheumatica
tcaattctatgataattccaatggactccattccatgactccattcgattccattcattgatgtttccaaacaattccattctatgatgattccattcaattccattggacgatgattccattcgcttcc

SEQ ID NO: 6969 - DNA, 164 bp, Protomyxzoa rheumatica
ggcattgtgacagatctctgcactgatcactccggtgatgtaactattgtctaagctctgctttaaggggctttgtcacatatctctgcactgataacccaggtgatgtaacacttctctacgctctgcttacagggagtattgtgtcttatctctgcactgat

SEQ ID NO: 6970 - DNA, 177 bp, Protomyxzoa rheumatica
tgaacgcacacatgacaaagatgtttctcagaaagcttctgtctagcttttacgtgaatatgtttcctttttcaccatcggcctcaaaccactcacaaatatccttttgtggattctacaagaatactgtttccaaactgctcaatcaaaacgaagtttcaactctgtgagaagaat

SEQ ID NO: 6971 - DNA, 137 bp, Protomyxzoa rheumatica
tgcttttgattccctacgatgatgattccactccattccgttcgatgatgattccatttgataccatactatgattccttttgattacatttgatgttgattccattcgatttcattcgatgattctatttgaatcc

SEQ ID NO: 6972 - DNA, 125 bp, Protomyxzoa rheumatica
ttccatgaaaatccatacaactccactccactccactccactccacgacactacactccactccactccattatattacattccattgtaaattcattccattccattcctttcttttgacggaa

SEQ ID NO: 6973 - DNA, 187 bp, Protomyxzoa rheumatica
atcaaaataaaggttcaactctgtgagatgaatgcacacatcacaagaaatttctcacaatgtttctgtgtaatttttttgtggagataattccttttccataatagtcctcaaagcgctccaaatatccacccgcaggttctacaaaatgactgtttcaaaactgctcaatcaaaagagaggttca

SEQ ID NO: 6974 - DNA, 280 bp, Protomyxzoa rheumatica
ctacaaaaagagagtttcaaaactgctctatctaaagatgggttcaactctgtgagttcaattcacacatcaataagaagattctcggaatgcttctgtgtcgtttttaggggaagatatttccttttccaacataggcctcaaagcactctaaatatccacttacagattctacaaaaagtgtgtttccaaactgcccaatcaaaagaaagattcaacactgtgagatgaatgtacatatcacaaaaaagtttctgagaattcttctgcgtagattttt

SEQ ID NO: 6975 - DNA, 156 bp, Protomyxzoa rheumatica
ttccttcccattccattccattccactccactccactccacgctaatccactccactccactccattacattctattttaaatccattcaattccattcctttctttggacaggatcgcactacatcacccgggctgcattgcactgcagaatctc

SEQ ID NO: 6976 - DNA, 196 bp, Protomyxzoa rheumatica
atggaatgcaatggaatagaatggaatggagtagtgaaatgaaatgtgagctgagtttgtgccactgcccgccagtctggtagacagggtgagatgctatcaaaagaaaggaatggaatggaatggagtggagtgaagttgattgtagtggagtggtgtggactggaatggagtggaatggaatgggatagagtgg

SEQ ID NO: 6977 - DNA, 140 bp, Protomyxzoa rheumatica
gctgagcctagacaagagatacatctcctggatgatcaggacccgtgtagacatataccagaaaattgttacatcatctgggtgatcactggagatatctgtcacaattcccctttaggagcagcttagacaagcgtgac

SEQ ID NO: 6978 - DNA, 160 bp, Protomyxzoa rheumatica
ttcccaaaataactagacagaagaattctcagaaattagtttctgatgtgtgaactcaactaacggagttgaaaatttctttgatagaactgtttggaaacactctttctgtgtagaccctgcaagtgcatattgggatagatttcacgatttcgttaga

SEQ ID NO: 6979 - DNA, 200 bp, Protomyxzoa rheumatica
tatttgaagatatttcctttttctccatgggctgcagagggctccaaatatccacttgcagcttctacaaaaagagatattcaaatctgctcaatcaaaagataagttcacctctgtgagtttaatgcacacatcacaaagtcgtttctcagagtgcttctttgtagtgtttatgtgaagatatttccttttccacaata

SEQ ID NO: 6980 - DNA, 138 bp, Protomyxzoa rheumatica
tacacatatatatatatatatataaatgtatttctatttacggtcatagcatagattcctaggggtgaaatttctgtctcattcaggtacaagtcagaagtcatggtgtcagaggaatttgaaccagagcaactccat

SEQ ID NO: 6981 - DNA, 145 bp, Protomyxzoa rheumatica
ctaccataggctgcaaagcactccaaatgtccacgtgcagattctaaataaagagtgtttttaaactgctcaatcaaaagaaaggttcatttctgtgttatgaatgcacgcatcacaaagatgtttctcagaatttttctatcta

SEQ ID NO: 6982 - DNA, 162 bp, Protomyxzoa rheumatica
tctagttcttatgtgaagatatttccttttccaccaaaggcatcaaagcactccaaatgtccaatcacaggtattatcaaaagggtgcttcaaaactgctaaatcaaattaaggctcaactctgtgatatgaatgcacatattgcaaagaaggttgtcaaaa

SEQ ID NO: 6983 - DNA, 179 bp, Protomyxzoa rheumatica
tccactccattccattccattccactccattccattccttcctttctgtcgacaggatctcactctgtcacccaggttggagtgcagtgtcataatctcagataacatttcatttcacaatttcattccactgcactgcattccattccattctattccatcccatcccattccactcc

SEQ ID NO: 6984 - DNA, 234 bp, Protomyxzoa rheumatica
tgaatgaaaagaaaggtttaatcctgttagctgaatccacacattgcaaagtagtttcacagatagtttctttgcagtgtttatttggagatactctgtttttccccataggcctcaaagggcttccaaatctccctttgaagattctttaaaaagagtatttccaacatgctgatcaaaggaaaagtttacctctcagatgaatcctcacatcacaaggcagtttcatactta

SEQ ID NO: 6985 - DNA, 128 bp, Protomyxzoa rheumatica
ttcacattaaaactagacagaagcactctcagaaacttctttgtgatgtgtaccttcaactcacggagttgaaacgtccttttgaggagagcagttttgaaactgtcgttttgtagaacctgcaagtg

SEQ ID NO: 6986 - DNA, 133 bp, Protomyxzoa rheumatica
gactgcattcgacgatgattccattcaatactatttggtgattccattagattatatttgatgatgatttcatttgactccattcgatgattccattcgagcccataccattattccattagattccattcga

SEQ ID NO: 6987 - DNA, 150 bp, Protomyxzoa rheumatica
tatgaaatatggttaagagtaattgataaaacaaaaattgtgacataaattatatcatagtttggatagaggttgaagaaagtggatgaaaattttaatgagccctttttgtgtgcactaaacttaatcttataggtgaacattataata

SEQ ID NO: 6988 - DNA, 267 bp, Protomyxzoa rheumatica
aactctgtgagatgaatgcacacatcaaaaagaagtttcccagaatacttctgtctagtttttatatgaaggtattgccttttacaccataggccgcaaatcatgccaaatatccacttgcagattctccgaaaaggtgtttcttaactactcaattaaaacaaaggttcaactttgtgtgatggacgcatacattacaaggaagtttcacagaatgcttctgcctagattttaggtgaaggtatttccttttccaccatagtcctc

SEQ ID NO: 6989 - DNA, 141 bp, Protomyxzoa rheumatica
gtgttctggaatcctacttgagggtgaaacattcaaaccagagcaggaaattcctgtaatcctaagtgaggtacaataaatcagaccatcgtggcagtgttctggaatccaatgtgagggagaagcatgcagaacccagca

SEQ ID NO: 6990 - DNA, 131 bp, Protomyxzoa rheumatica
aaaagtttaattctgtgagatgaaaccacgcatcacaaagcagtttcacagactatttttttctagttttttgtaggaatattcagtttattccctcacacctcaatgagctctaaaatgtcctttcacag

SEQ ID NO: 6991 - DNA, 143 bp, Protomyxzoa rheumatica
agcattctcagaaactgctttctgttgtgtgcattcaacccacagagttgaacccttcctttgatagagcagttttgaaacagtctttttgaagactctgcaagtgttcatttggagcgctttgaggcatatggtggaaaagg

SEQ ID NO: 6992 - DNA, 147 bp, Protomyxzoa rheumatica
ggagcgctttgagcctgtggtggaaaagcaaaaatcttcacatgaaaactggatagaagaattttaagaaacttctttgtgatgcgtggtttaatctcacagagttgaacatttcttttgatggagcagtttggaaacactcttttt

SEQ ID NO: 6993 - DNA, 291 bp, Protomyxzoa rheumatica
aatcccgtttccaacgaagggctctaaaaagtccaaatattcattgcagattctacaaaatgagtgtttcaatattcctctatgaaaagcaaagttaaacactctctgttgaatacacacatcacagagtagtttctgagaatcattctgactggtttttctatgaagatatttccttttctaccataggcctcaaaccgcactaaatatccactttgaaattctacaaaaagagtctttcaaaactgccctatcgaaaggagggttcaactctgtgagttgaatgcacac

SEQ ID NO: 6994 - DNA, 128 bp, Protomyxzoa rheumatica
aggggataaggagtgtccctgtgagatccatactgtgtccttggttaaaaaaaggcatctgttaccttgactgtattctgagtatccatgaggcaagaagtttctttaattcaatggggagggaaggt

SEQ ID NO: 6995 - DNA, 131 bp, Protomyxzoa rheumatica
ccaaaaaaagcttgaagtctgtgagatgaatggacacatcaaaaggcagtttctcagaaagcttctttctcgtttttaacggaagatgtttcctttttcaccacaggactcaatgctctactaaatatcac

SEQ ID NO: 6996 - DNA, 176 bp, Protomyxzoa rheumatica
aaaactacacagaagcattctgagaaacttctttgtgatgggtgcattcatctcacagggttgaacctattttataattcagcagttttgaaatactctatttgtagaatatgcaagtggatatttggagcgctttgaggccaacagttgaacagcaaatatatttacataaaaac

SEQ ID NO: 6997 - DNA, 239 bp, Protomyxzoa rheumatica
gaactcaatggaacaaaatggaatgaaacggaatgggtgcagagattgtgacactgcgctaaagcctgtgtgacagaaggagatcctgtcaaaagaaaggcgtggaatgggatggagtggagtggagaggagtggcgtggaatggagtggagtggagttggagtggagtggaatggaatgaagtggagtggagtttaatgcaatggagtggagctgaaaaaactggagtggagtggaat

SEQ ID NO: 6998 - DNA, 172 bp, Protomyxzoa rheumatica
agaatgcttctatgtggtttttatgtgaagatattttttttccaccttaggccacaaatggcttcaaatatctacttgaagattctacaaaaagagagtctcaaaactgctgtatcgaaaggtacgatcaacactgtgaattgaatgcacacatcacaaaaaagtttctcag

SEQ ID NO: 6999 - DNA, 185 bp, Protomyxzoa rheumatica
tcgaatggaatcaaaatgactcatcatgaaacggaatcaaatggaataatcatggaatggaatggattggaatcatccagtggaatcgaatggaatcaacatcaaaaggaataaaaaaatcatcgaaagtaattgaatagaatcatcatcgaatggaatcctcatcgaatggaaactaatagaat

SEQ ID NO: 7000 - DNA, 124 bp, Protomyxzoa rheumatica
tgagaaacttctttttgatatgtgcattaaactcacagaggtgaacctatcttttctttgagcagttatgaatccctctttttgtacgatccacaagtagacatttggaaccctttgcagccta

SEQ ID NO: 7001 - DNA, 173 bp, Protomyxzoa rheumatica
attccagaacaatgctatgagggtgtgaatgagtgaacctcacataggattccagaattctcctgctctcttctgaatttttgaccctctgaaaggattccagaacactgctacagggttctgagtgtttgttcctcacataggattctggaacactactaagagtttctgaa

SEQ ID NO: 7002 - DNA, 176 bp, Protomyxzoa rheumatica
gaatggacacgaatagaatggattctaatagaatggactgaaatggaatggattcaattggatggactcgaattgaatgtaatcaaacagaatggaatcgatcgggatggaatcaaatggaatggaatcgaatggaaaggaatcgaatggaatgtacaggaaggaaatggaattaa

SEQ ID NO: 7003 - DNA, 143 bp, Protomyxzoa rheumatica
aggatttgccccattgggcaggggaggtttccttccctatctgcaggacttgctcagtggtttgctgagctggcaagttttgcacatcctcatttaaaaatgatacctgttttggttccggcttagcctggtcttgtatgtgc

SEQ ID NO: 7004 - DNA, 162 bp, Protomyxzoa rheumatica
ttgtggaatttgcaagtgtatatttagagcgctttgaggcatacggtagaaaaggatatatcctcacataaaaattagacagaagaattgtcaaaaaataatttgtatctttgcattcaactcacggagttgaacattcctctttatagagcagttttgaaa

SEQ ID NO: 7005 - DNA, 132 bp, Protomyxzoa rheumatica
catcacaaagcagtttttcaaaaagattttttatagtttctatttcaagatgatttttttcaaccataggcctctgttcactcccaaatgtccatttgtagattctaaaaaaaacagtgtttccaaactgct

SEQ ID NO: 7006 - DNA, 135 bp, Protomyxzoa rheumatica
ggacctctttgaggccttcgttgtaaatggggttccttcatataaaactagacagaagacttctcagaaacttctttgtgaagtgtgctttcaactcacagatttgaaccttcttttcaatagaggagttttgaa

SEQ ID NO: 7007 - DNA, 149 bp, Protomyxzoa rheumatica
tatgttactcttttctactctctgactacagagggttttgtgacatcactcttcacggatcacctgggttatgtaactcttgtctaggctctgactacgggtgcattgtgacttatttctacactgatcacccaggagatgtgactctt

SEQ ID NO: 7008 - DNA, 126 bp, Protomyxzoa rheumatica
aagcttgtggctctcgttcatttccacataggagaccagagccagaccccagagacaagatgcctcccaggcgtgatggcatgactatggattcccgtgtgcggcaacatggggagtctgcagtgt

SEQ ID NO: 7009 - DNA, 168 bp, Protomyxzoa rheumatica
caaacattcagaccctcgtatcagtgttccggaatcttgtgtgagggacaaacactgagaacccagcagcagtgttctggaatccaatgtgatggacaaactttcagacattcgtaggagtgttctggaatcctttgtgaaggacaaacacttagacccacgtaacag

SEQ ID NO: 7010 - DNA, 141 bp, Protomyxzoa rheumatica
ttgtggaaaggaaatatcttcacataaaatctacacagaagcactctcagaaaattctttgtgatctgtgcatttatctcagagttgaacccttcttttgattgaacagtttggaaacactctttttgcagaatctgcaag

SEQ ID NO: 7011 - DNA, 130 bp, Protomyxzoa rheumatica
tctcagctacactccattgcacctcaatactccccattccactccactctactaaagtgaatttctttccgttccagtccactccattccatttctgaccattccactcaaatccatttcattccactcc

SEQ ID NO: 7012 - DNA, 167 bp, Protomyxzoa rheumatica
ggacccgaatggaatcatcaatgaatggaatcgaatagagaaatcgaacggaatacattggaatcatcatcgaaaggaaccgaatgcagtcgtcatcgaacggaatcaaacggaatcatcatcgagtggaatcaaatggaatcatcatcaaaaggaatctaagggaa

SEQ ID NO: 7013 - DNA, 126 bp, Protomyxzoa rheumatica
ttatatgaaggaaaaccttttccaaagaaggcctcaaaaaagtccaaatattctcctgcagattctctcaaaagtgtgtttcaaaactgcactatcaaaagaaagtttaaactctgtgagttgaac

SEQ ID NO: 7014 - DNA, 122 bp, Protomyxzoa rheumatica
ggacaaacactaagaaaccaacagcagtgttctataatcataagtgagggacaaacattcagacgacagcaggagtgttctggaatcctacgtgatggaaaatagttcagaacctcgtagca

SEQ ID NO: 7015 - DNA, 130 bp, Protomyxzoa rheumatica
tgtctactttttatgtgaagctaatctggtttccaacaaaggcctcaaggcggtccacatatccactagctgattctagaaaaagagtgtttcaaaacgattctatcaaaaggaatgttcaactctgtga

SEQ ID NO: 7016 - DNA, 126 bp, Protomyxzoa rheumatica
gaatgaacaaaaacactcattgcaaactactgaatccaaagaaagctttaagtctgtcagatgaacaaacacatcacaaagcagtttctcagaaatcttatttctattttttatctatagatattt

SEQ ID NO: 7017 - DNA, 143 bp, Protomyxzoa rheumatica
agaactggaatcgaaaggaatggactagaattgattggagtggaatagaaaggacttcaatgtaacagaatgtaatgtaattgagttgaaaggaatggaatcgaatgtaatgtaatcaaaaggaatggaatggaatgccatgg

SEQ ID NO: 7018 - DNA, 161 bp, Protomyxzoa rheumatica
ggattctagaacactcctgctcttgtcttaatgtttgaccctcctgtaggattccagagcactgctgctttggtctaaatgtttgtccctcatttaggattccagaacactgctgctgttgtctgaatgtttgtcccccacgtaagattccagaacactgc

SEQ ID NO: 7019 - DNA, 167 bp, Protomyxzoa rheumatica
ttcctttccgctcgggttgattccatgccattccattccattccattccaatcaggttgattccactcagttccattgcattacattccatttcattccactcgcgttgagtcagatctgactatggggacatagtgacatatctctgcactgatcactcatgtgat

SEQ ID NO: 7020 - DNA, 166 bp, Protomyxzoa rheumatica
atggactggaatggactggactggcacaaaatggaattgaacgcattggaattgagcagaacggaatggaatggactggaatggaatggtcttgaatttaatggactggagtggaatggtctcgaatgtaatgaacacgaatggaatggaatgaaatggaatggaa

SEQ ID NO: 7021 - DNA, 134 bp, Protomyxzoa rheumatica
cgacttatccctgcactgatcactaggtgatgtaacacttttctaggttctgtctacacgggaattttcatgtatctctacactgatcacctaagtattctgacccttgtctaggttcagcctactggggattt

SEQ ID NO: 7022 - DNA, 151 bp, Protomyxzoa rheumatica
gtagtatatgcaagtgaatattcggagtgcattgaagccttctttggacacgggaatatcttcacataaaaagtagacagaaggattctcagaaactactttttgatgtgtgccttcaactcacagaggtgaacacttctttagatagagc

SEQ ID NO: 7023 - DNA, 238 bp, Protomyxzoa rheumatica
agatatttccttttctaacataggctgcaaagcgacccaagtgtccacacgctgattgtacaaacgaagggtttccaaactgctcaatccaaggaaagtttcagctctgtgagatgaacgcatacatcacaaagaagtttctcagaattcttctgtctattatttatgtgaaaatattaacttttccaccataggccacaaagtgctccaaatgtccacttgcagattctacaaaaag

SEQ ID NO: 7024 - DNA, 161 bp, Protomyxzoa rheumatica
gtgagttgaatgcacacatcacaaagcagtttctgagaatccttttgactagattgtatgcaaagatatcccgtttacaacgaaatcctaaaagagctccaaatatccacaagcagattctacaaaagaagcgtttcaaaactgctctatcaaaagaaaga

SEQ ID NO: 7025 - DNA, 125 bp, Protomyxzoa rheumatica
aggagattggactagcagagatttcaagtgaaagccaggtgaccagttaatagtatactccattaactcaggaaagagatgaggtgatattgaagatggagaggaaaagcctggaatgaagatta

SEQ ID NO: 7026 - DNA, 172 bp, Protomyxzoa rheumatica
actctctgagatgaatgcatacatcacaagctgtttctcagatagcttatttctagttttcatctgaagatactttcgttttcatcataggtttcaatgcactccccaatatccattcacagattttttaaaaaaatattgcttccaaactgttgaaggaaaagaaaagtat

SEQ ID NO: 7027 - DNA, 130 bp, Protomyxzoa rheumatica
ctcagagagattccttctagttttcattcaggggtatttgctttttcaccattggccccaaagagctccgaaatatccattcacagaaaggacaaaaacactttttccaaactactaaattcaaagcaag

SEQ ID NO: 7028 - DNA, 208 bp, Protomyxzoa rheumatica
tgtatgataaatgcacacatcacacctgctgaatcaaaagaaagatttaaccctgtgagaccaacacacatcacaaagcagttacacaaatagcttctttcttgtttttatgtggtgtattttgttttttccataggcctcaaagggctctcaaatgtcacatcatagaatctgcaaaatgagattctgctgaattaaaagaaatatt

SEQ ID NO: 7029 - DNA, 135 bp, Protomyxzoa rheumatica
tgtgctttttgggggtattgtgacatatctctgcactgatcacttaagtgatgtcagacttgtgtaggctctgcctgaaggggcattttgacatgtctctgcactgttaaccgaggtgatgtaactcttgtctag

SEQ ID NO: 7030 - DNA, 136 bp, Protomyxzoa rheumatica
ctgcactgatcacccaggtgatggactcttgtcttggatttgcctatgggggaattgtgacatatctctgcaccgatcagccaggtgttgtaactctggtctgagctctgcctataatggcattgtgacagatctc

SEQ ID NO: 7031 - DNA, 186 bp, Protomyxzoa rheumatica
ccgctttgaagtcaaaggtagaaaaggaaatatcttcctagaaaaactagacagaatcattctgagaaactcctttttgatgtaagcattcagcttacagtagttaatctttcttttgatagagcagttttcaaattctctttctgtgggatatgtaagtgtttatttagagcgctttgaggccta

SEQ ID NO: 7032 - DNA, 123 bp, Protomyxzoa rheumatica
tttctttcgacaggatctcactctgtcacccactctagagttcggtggcacaaattcagctcacgtttcatttcaccattccataccattgtattccattccattccatgccattccattcca

SEQ ID NO: 7033 - DNA, 429 bp, Protomyxzoa rheumatica
gcctggcctgcaatgtgtctctaaggaatggaaactaagcgttggggtaagaaattcttaatgtcctaagaggtttgcttttaacgcaaaggtatacgtggagattccttccaggtatagtgcatccaaccactccaaaaagaggctgcattcccataccttgggctgttccctgagaggagatgacacaagggatgctatttactagacacttcaagagtcatggccactgttggcatcttggggaatcctcaaacagttttgaaattcaaaaccaagaaaataacaggatggctgaggatgtattgccctgtgaagtttccaaaatgaaacctgaacccaaaggctttctgatggggtgtctgtgccaagagaagtttaaacaaaggggcacaaaggttttccgctttttatttatttttttttaca

SEQ ID NO: 7034 - DNA, 141 bp, Protomyxzoa rheumatica
tccaggggtgacttcatatattgataggaccgtgatgccctcctgagccaaaaaaaagcaagttttcattaaggatttcaaaaggggaaggggtgtatgaacggtgagtaggtcacaaagatcacaagcttcaaacggcaa

SEQ ID NO: 7035 - DNA, 130 bp, Protomyxzoa rheumatica
cttctgtctaggttttatgtgaagatatttccgtttctaccataggctgcaaagcactccagtgtccacatgcagagtctaccaaaagggtgtttccaaactgcttaatcaaaagaaaggttcaactctg

SEQ ID NO: 7036 - DNA, 148 bp, Protomyxzoa rheumatica
aaggaaatatcttcacataagaactacacagaagctttctgagaaacttctttttgatgtgtggattcaactcacgaagttgaacctctcttttgattgagcagtttagaaacactctttttaaagaatctgcaagtggatatatgaa

SEQ ID NO: 7037 - DNA, 159 bp, Protomyxzoa rheumatica
caccctgtaacccaagcccaccacacctccccatcaaggtataacccaccttggtctcattgtgcaaactgggggagccccttatatcgagtgtcaaccaaaaataaaatcctaagccccccagttgactgaacttactccctctgggccaaggaggac

SEQ ID NO: 7038 - DNA, 186 bp, Protomyxzoa rheumatica
tgattccatttcatgatccttaaatttgattcaattcagtgattccattcgattctagtcaacgattgttccaatcaaatcctatagataatgattccattcaatttcatttgattatgattatattcgattccatttgatgatgattccatttgagtccattcaatgattccattcgattccatt

SEQ ID NO: 7039 - DNA, 168 bp, Protomyxzoa rheumatica
ttaactcacagagattaacctttcttttcatacagcattctggaaactctctgtttggaaagtctacaagtggatatttggagctcttagatgccttctttggaaacggaatttcttaatataattctagagggaagaattcgtagtaacttctttgtgttatgtgta

SEQ ID NO: 7040 - DNA, 154 bp, Protomyxzoa rheumatica
tgtctctactgaaaatacaaaacttagcagggcgtggtggtgctcatctgtaaccccagctaatcaggaggctgaggagggaaaaatcacttgaacctgggaggcggaggttgcggtgagctgagatgatgcctgggcgacagagcgagactct

SEQ ID NO: 7041 - DNA, 171 bp, Protomyxzoa rheumatica
gacactatgatgaggccgggtgagtgcacactggtcagtataatgaggccaggtgagtgtacactggggcactatgatgaagctgggcgagcacacactgggacactatcatgaggctaggtgagcgcacaatgggacactatgatgaggttaggtgagcgcacactgggg

SEQ ID NO: 7042 - DNA, 144 bp, Protomyxzoa rheumatica
aatatcttcacataaaaactagagagaagcattccctgaaactgctttgtgatgtgtgcattcacctcacggaatggaaccgttcttttgatagagcagttttgaagcagtcttattgtaggatctgcaagtattcatttggag

SEQ ID NO: 7043 - DNA, 130 bp, Protomyxzoa rheumatica
aaagcagtttctaagaaagattcttcctagtttttatctgaaggtattttctttttgtacatatgcctcattgagcttccaaatgtccatttgcatattctacaaaacagttcttccaaaagcacagttg

SEQ ID NO: 7044 - DNA, 124 bp, Protomyxzoa rheumatica
tcagaccctcgtcacagtgttctgtaattctatgtgagggagaaacactcacaacccagcagcagtattctgtaatcctatgtgacggacatacatgtaggccccagcagcagtgttctggaat

SEQ ID NO: 7045 - DNA, 178 bp, Protomyxzoa rheumatica
ccttctagtttttatcctgggatattctgtttttctccactggcctcaatgagcacccaaatgttcacttgcagattggacaaaaacagtgttccacaagagctgaatgaaaagaaagttttaattctgtgagttgaatacaaacataacacagtggttgctgagatagcttccactt

SEQ ID NO: 7046 - DNA, 127 bp, Protomyxzoa rheumatica
ttccatttgattacattcgaggattccattcgttaccatttgatgatcattccattcgattccattaaatgatttcattcaatgaatgtttccattcgatgaagattccaatcaattccattcgatg

SEQ ID NO: 7047 - DNA, 191 bp, Protomyxzoa rheumatica
gatgtgtgcattcaactcacagagttgaacgtatcttttgatttagcagttttgaatatatctttttgcagaatctgcaagtggctgtttggagagctttgaggcctatcgtggaaaaggaaatatcttcaaataacaactacatggaagcattctgagaaactcctcttttaagtgtgcattcaactcat

SEQ ID NO: 7048 - DNA, 123 bp, Protomyxzoa rheumatica
atatgtgaccagcccaaatgcccatcaatcaatgagtgggtaaaggaaatatggcatatatatatatatggcatatatatatatgtatatatatgccattgtatatatatacatatatataat

SEQ ID NO: 7049 - DNA, 151 bp, Protomyxzoa rheumatica
ctttgtgaagtgtgctttcaactcatagagacgaaccttcctattgagagggcagttttcaaatagtgtatttgtagtatctgcaagtggatatttggagcgatttgaagactatggtggaaaaggaaatatcttcacgtaaaaactagac

SEQ ID NO: 7050 - DNA, 164 bp, Protomyxzoa rheumatica
acgggatatattcacatacaaactagacagaagcattctcagaatctactttgtgatgtgtgtgttcaattcccggagttgaacctttcttttgatagagcagttttgaaacacggcttttgtagtctctgcttgtggatatttggaggtctttgaggaattcg

SEQ ID NO: 7051 - DNA, 157 bp, Protomyxzoa rheumatica
attccattccattcgtttccgtttcattacattacattacactccactggagttgctattccattccacactttcgagttcatttcactctagtccattcgagtgcattccattccattccattttattcgactcgattccattcaattcgaattcg

SEQ ID NO: 7052 - DNA, 172 bp, Protomyxzoa rheumatica
catcggcctccaagccctccaaatgtccacttgcagaataaacctaaagagagtttcaaaactgctaaatcaaaggaaatgtttaactctggaatatgaatgcacacgtcacgaagaagttcttcagatagtttctgtctagattttatgtgtagatatttccttttctacc

SEQ ID NO: 7053 - DNA, 139 bp, Protomyxzoa rheumatica
gtacatttgtagcgctttaaggcctatggtggaaaaggaaatatcttcatataaaaaccagtcagaagaattctgagacacttatttgtgatgcgtgcattcatctcacagggttgaacctatcttatgattgagcagt

SEQ ID NO: 7054 - DNA, 180 bp, Protomyxzoa rheumatica
cgaatggaatcaaaaggaatcatcaacgaatgtaatcgaatggaatcatagaatggaatccagtgtagtcatcttctaattgaacccaacggaatcattaaatggactctcatggaatcatcgaatggactcaaatggaatcatcttcgaatggaatagaatggaatcatcgaatacaat

SEQ ID NO: 7055 - DNA, 299 bp, Protomyxzoa rheumatica
aattgagtccaggcatggtggttcacacttgtaatcccaaaactttgggaggctgaggcaggctgatcacttaagctcaggagttcaagaccagccatggaaacatggcaaaatcccatctctactaaaaattcaaaaattgtctgggcattgtggtgcttgcttgtagtcccagctatttgggagactgaggcacaaggatcacttaattttcatttctctaactatcattgatgctgagctttttctcatacacttgttggcctcatgtatgtcttctttcgaaaactgtccattgt

SEQ ID NO: 7056 - DNA, 196 bp, Protomyxzoa rheumatica
tattaaaatttaatttattataaaaataactattaaaaattccctgtcatcaatggaaggataaattttagtgcagtgttggtataacaatcttcggaatttttaaatattctaattattcaaattgtggtcatgctttaaaaatatattccatagaagttatgctattttaaaataccattctctattgtgggaa

SEQ ID NO: 7057 - DNA, 159 bp, Protomyxzoa rheumatica
gacagaagcattctcaagaacttcatggagatgtgtgcattcaactaacagtgtttaatctgtcttttgatggaggagaattgaaacactccttttgtagaatctgcttgtagatatttggaactctttgaggaatttgttgcaaactggtatcttaac

SEQ ID NO: 7058 - DNA, 124 bp, Protomyxzoa rheumatica
cactccagtctgggtgacagagtgagatccagtcaaaataaagcaatggaatggaatgtcatagaatggaatggagtggagtggactggattcgagtggagtggaatggaatggagtggagtgg

SEQ ID NO: 7059 - DNA, 137 bp, Protomyxzoa rheumatica
cacatcacaaagaagtttgtcagaatgtgtatgtctagtttttatttgatgatatgtccttttccacaataggctacaaatcgctccaaatgtccacttgcagattcaacaaaaagaatgtttcaaagctgttcaat

SEQ ID NO: 7060 - DNA, 159 bp, Protomyxzoa rheumatica
tgtctcaatgaccccagtcggcgaagcctatacaagagttacatcttctccgtaatcggtgcagtgatatgttaaaatgctcctgtaggcagagcctagacaagcgttacatcaccagtgtgatcagtgcagagataactcacaatacgccctgtaagc

SEQ ID NO: 7061 - DNA, 130 bp, Protomyxzoa rheumatica
tttttgatgtgtgcattcatctcagagttataactttcttttgactcaggaggttggaaacagtctttttggagaatctgtgaagggtcattcaggaacccattgtggcctacttgaagaaactgaatat

SEQ ID NO: 7062 - DNA, 128 bp, Protomyxzoa rheumatica
tggacaaatctcagaaaattgtttcatcacctgggtgatcagtggcgatatctgtcacaattcccctttaggctcagcttaggcaagcattacatcacatgagtgatcactgcagatatatgtcacta

SEQ ID NO: 7063 - DNA, 122 bp, Protomyxzoa rheumatica
tccactccactccactccgctacaacccgttcagttccattccttctcattgcatttcaattccactccattccactccactccagtaatttctatttaattctatttgactccattcaatt

SEQ ID NO: 7064 - DNA, 146 bp, Protomyxzoa rheumatica
gagctcattgaggccaaggtgaaaatgcaaatatcccaggataacaactagaaggaagttatctgagaaactgttttgtggtatgtgcatttatcttgcagggttaaacttccttttcattcaacagtttggaaaccctgattttt

SEQ ID NO: 7065 - DNA, 124 bp, Protomyxzoa rheumatica
gtctagtttttatgtgacggtatttccttttccaccataggcctccaattgctttaaatatacacttggaaattctacaaatagtatgtttcaaaactggtctatcaaaagataatttgagctc

SEQ ID NO: 7066 - DNA, 133 bp, Protomyxzoa rheumatica
tttctgagaatgattctgtctagtttttctatgaagatatacccttttctaccataggcctcaaagcgctctaaatagccattaggaaattctacgaaaagaataaataaaaactgctctatctaaaggaagg

SEQ ID NO: 7067 - DNA, 148 bp, Protomyxzoa rheumatica
aggttctgcttaaaggggctttgtgacatatctctgcactgaacaccccagggaggaaacagttgtatacactctgcctacaggaggctttaccacttatccattcactgatcactaggtgatgtaacacttgtcttggctctgacta

SEQ ID NO: 7068 - DNA, 148 bp, Protomyxzoa rheumatica
tgttgccagagcctagacaagagttacatcagctctgtgatcagtgcagtgacatgtcacaatgtctctatagccatatccttgacaatagtgacatcaactgggtgatcagtgcggagatatgtcacaatgactccagtaggcagag

SEQ ID NO: 7069 - DNA, 134 bp, Protomyxzoa rheumatica
cagaccccagcagcagtgttctggcatcctatgtgagggataaacactcagaaagtagcagcagtgttctggaatcctattagaaggacaaacattcagacgagagcaggagtgttctggaatcctatgtgagg

SEQ ID NO: 7070 - DNA, 131 bp, Protomyxzoa rheumatica
acctcttcagatataggtaactgtattcctaagttactcacagatactgtgtatcacaaaacaaggagctctcttacataagttatgtgcttccatttgccctcagcatctagaatgaggctcaaaataac

SEQ ID NO: 7071 - DNA, 128 bp, Protomyxzoa rheumatica
gattccatatgattccattcaacattgattccattcttgcccatttgatgattccattcctttccattagatggtgattcaattcgagtccattcgatcattccacttgattccatttgatgactatt

SEQ ID NO: 7072 - DNA, 142 bp, Protomyxzoa rheumatica
acattacaaagaagtttctgtgaatgcttctgtccagtttttatgtaaagatatttcctttttcaccataggcctattaggtgctccaaatatccacttgcagattctacaaaaagtgtttcaaaagtgctgtatgaaaaga

SEQ ID NO: 7073 - DNA, 156 bp, Protomyxzoa rheumatica
agtcctttcaatgatgattacattcgagtccattcgatgatgattccattcaagtccattcgatgattattccatgtgattccattcgatgattactcctttcgtttccatttgatgatgattccattcggttccattagataatgattccattca

SEQ ID NO: 7074 - DNA, 128 bp, Protomyxzoa rheumatica
ttccattccattccattccactcgggttgattccatacctttgcattccattccaatcctttcattcctttccttcccattgcatttcattcgggttgattccattccattgctttccaatccattcc

SEQ ID NO: 7075 - DNA, 294 bp, Protomyxzoa rheumatica
attctattcaaagatgattccactcgattccttttgaagatgattgcattcaattccattcgatgattccattcgtttccatttgatgatgattctattagtttccattcaatgaggattccattcgatgatgtttctattcaattagtttgatattttttttaattctttcgaagttgattccattcaattccactggatgattccattccattccaatcgatgattattccatttgattccatttgatgatgagtcattttgattccattcgatgatgattccattctattg

SEQ ID NO: 7076 - DNA, 281 bp, Protomyxzoa rheumatica
aatcgaatggaatcatcatcaaatggaattgaatggaatcaacatcgaatggaatcgaatggaatcctcgaatgcaatagaattgaattatcaccgaatggaatcgaatagaatcatcagaggcaatggaattcaatcatcattgaatggaatcaaatgaaatcatcatgaaatggaatcgaatggaatcatcattgaatggaaacgaatggaatcatcaacgaatgaaatagaaaggaatcatcatcaaaaggagtcgaatggaatcatcaatgaatgga

SEQ ID NO: 7077 - DNA, 122 bp, Protomyxzoa rheumatica
tgtagcacatttggcatagtttactatctgtagcgcatttgggatagtttactatctgcagtgcatttgggatcatttactctctgcctcgcatttgggataatttaccatctgtagtgcat

SEQ ID NO: 7078 - DNA, 262 bp, Protomyxzoa rheumatica
ccattccattcaattccattccattcgattccgttccatactactgcattccattcaattacattctatttgattatattccattcgagaccattccattcgagtccattctatttgagtacattccatttgagtccattatatttgggtccattcctttccatgccattccattccactcgattccattccattcgattatattcaattcgagtccattccactcgaattcattccattccattccattccattccattcc

SEQ ID NO: 7079 - DNA, 129 bp, Protomyxzoa rheumatica
ttggaaacgctcattttagagaatctgctaagggaaattttggagcccattgtggccaacagataaaaactgaatatttccaggtaaaaactatagagaagctatctgtgaaactgctttgtgttgtgt

SEQ ID NO: 7080 - DNA, 151 bp, Protomyxzoa rheumatica
agaatgttcaactctgtgagttgaatgcaaatatcacaaaagtaatttctgacaatgcttctgttttgtttttatgtgaagatatttccttttctactgtaggcttcaaagcgcacaagacatacacttgcaaattccacaaaaagagtgt

SEQ ID NO: 7081 - DNA, 144 bp, Protomyxzoa rheumatica
gaggaattcgttgtaaacgggatatcttcacatacaaacttgacagaagtattctcagaaactgctttgcgatgtgtgcattcaactcaacgaattgaacctttcttttgatacagcagtgttgaaacacacttattgtagaac

SEQ ID NO: 7082 - DNA, 164 bp, Protomyxzoa rheumatica
ctcaccaggaataccgcgggaactggaagctgctctctgggctcccacgtgtagtcatcagggagaaaccagcctgggagggaggaggggagtgtggaactgaacctccgtgggagtcttgacagttccaggccctctctccgtgaaggaggcagtgcctgtgg

SEQ ID NO: 7083 - DNA, 125 bp, Protomyxzoa rheumatica
aatggaatggaatggaatcatcaaatggaattaatgcaatcatcatcaaatgcaatcagataggatcatcgaatggaattgagtagaatagtcatcgcatggaatcgaatggaataatcgaatgg

SEQ ID NO: 7084 - DNA, 130 bp, Protomyxzoa rheumatica
tgacagagggagatcctgtcaaaagaaaggagtggaatgggatggagtggagtggagtggaaaagagtggagtggagtggagtggaatggaatggaaattattggaaaggaatggagtggagtaaggtgg

SEQ ID NO: 7085 - DNA, 139 bp, Protomyxzoa rheumatica
ctcagaaacatgtttataatttgtgtactcagataacagagtgcaaccttcctttttacagagaagctttgatacactatttttgtagaatctgcaagttgatatttggattgctttaatgatatcgttggaaacggaa

SEQ ID NO: 7086 - DNA, 204 bp, Protomyxzoa rheumatica
tttgtccctcacataggattccagaacactgctaggagggtccgaatatttgatcctgaaataagattccagaaaactgctgctcgagtctgagtgtttgtccctcacatggcattcaagaacactgctgctggggtctgaatgtccctcacatagaattccagaacacggttacaagggtctgaatgtttgtccctcacatag

SEQ ID NO: 7087 - DNA, 164 bp, Protomyxzoa rheumatica
ttctttgtgatgattgagttgaactcacagagttgaacccttctttatattaaacagtttggaaactgtctttttgtagtatctgtagagggatgtttgcgcgaatttgaggcctatggtgaacaaggaaatatattcacataaaaactagacagaagcattct

SEQ ID NO: 7088 - DNA, 289 bp, Protomyxzoa rheumatica
cagaaagctagctagacttcaatcaagaggctcaggaagcagactcccaccttttctatcagctaatgataccttttcttgagtccaatagtcaagcataactacctcaggggaatagtgaaagaaacctgaatatgctacagtgcactgcagtcctttaaacctcccgatgggagtacaaacttccagtaatcacatacctggagaaaacatgagagttgtaggagagagagagatccaatccagcacctcctgtacttccttccaccatttctaataaaacactggc

SEQ ID NO: 7089 - DNA, 138 bp, Protomyxzoa rheumatica
aaacttctttgtaatgtttgcattcaactcacagagttggacatactttatcatagggaatttttgaaacactctttcaggagaatctgcaagtggatatttggaacatgtagaggccttcgttggaaaaggaatatc

SEQ ID NO: 7090 - DNA, 151 bp, Protomyxzoa rheumatica
gagtgtactggaatggaatggaattttagggaatggaattgaatgaaatgctatggtgaaacgaaatgtgagctgagattgttgcactgcactataacgtggctgaaagaatgagatcctgttgaaagaaaggaatggaatgcagtggagt

SEQ ID NO: 7091 - DNA, 148 bp, Protomyxzoa rheumatica
tcagaatgtttctgtatagtttttatatgaagatacttcgtcttccaccataggcttcagagcgttctgaatttccacatgcagattgtacaaagcttttcaaagccgttcaatcaaatgaaagcttcaaacctgtgaaatgaatgca

SEQ ID NO: 7092 - DNA, 178 bp, Protomyxzoa rheumatica
ctgctcaatctaaagaaagtttcaaccctgtgagatgaatgcacacatcataaacaagtttctcacaatggatctgtcagctttttatgtgaagatatattctttttaaccataggccttaaactgctcatgaatattcctctgcagatactacaaaaagactgtttccaaactgctg

SEQ ID NO: 7093 - DNA, 128 bp, Protomyxzoa rheumatica
gcttctttgtagttttcatgtgaagatatttccttttccacaatgggcctcaaagcactctgtgagatgaatgcacacgtcacaagacatttcccagaatgattctgtgtacttttcttgtgaagata

SEQ ID NO: 7094 - DNA, 136 bp, Protomyxzoa rheumatica
agtttctgagagtacttctgtctaatttttatgtgaacatacccccgtttccaaagaaggcctcaaagcgctccaaatgtctacttgcagactttacaaacagagggtttcaaaactcgtctattgaaagaaaggt

SEQ ID NO: 7095 - DNA, 156 bp, Protomyxzoa rheumatica
gagaaactgctttgtgatgtgtgctttcatctcagagttaaatatttcttttcattcagcagtttggaaagactgccttgtccattctgccaatggacattttggagctcattgaggccaatggagaaaaagcgaatatcccaggataaaaacatc

SEQ ID NO: 7096 - DNA, 130 bp, Protomyxzoa rheumatica
aaggaaatatcttaccataaaaactagacagaggcattttcagaaactgcttcgtgatatttgccttcaaatgacagaatttccaagtggatttttagtgtcgtttgaggactatggtagaaaaggcaac

SEQ ID NO: 7097 - DNA, 180 bp, Protomyxzoa rheumatica
cagtgttctggaatcctatgtgatggacaaacatttagacgccagcagcagtattctggaatcctaggtttgggacaaacactgagaacctactagcagtgttctggaaccatatgagagggaccaacgttgagaccctcataggagtgttctggaatcctgtgtgatggataaatattc

SEQ ID NO: 7098 - DNA, 126 bp, Protomyxzoa rheumatica
atttcatttttcaccataggcctcaagcgctccaaatgtctacttgcagatactacaaaaagagtatttcaaactactctatgaaaacgaatgttcaactctgcgagttgattgcaaacatcacaa

SEQ ID NO: 7099 - DNA, 132 bp, Protomyxzoa rheumatica
aacccttattttaatagcgcagttttgaaacactctctttgtagaatctgcaagtggtcattttgtgtactttgtggcctatggtgaaaaacgaaatatcttaacataaaaactagacggaagcattctcag

SEQ ID NO: 7100 - DNA, 149 bp, Protomyxzoa rheumatica
acattcgaatccattctataccattgcagaccattcgatttcattcgatttcattccattcaaatccgttccattcatttccattcaattcgattccattctgttcaagactgttccattctattccattactttcagttccattccat

SEQ ID NO: 7101 - DNA, 145 bp, Protomyxzoa rheumatica
cgtagcagtgtacaggaatcctatgtgaaggacaatcattcagaccacagctggggtgttctggaatccaacgtgtgggaataaaattcagaaccttgtagcatttttctggaatcctatgtgaggaaaatacttccggagccca

SEQ ID NO: 7102 - DNA, 140 bp, Protomyxzoa rheumatica
tacgagggtctgaaagtttgtcccacacttaggataccagaacaccacagctgtggtctcaatgattgtccctcacatgggattccagaactccgctgctgggttctgagtgtttctccctcatatatgattccagaaat

SEQ ID NO: 7103 - DNA, 127 bp, Protomyxzoa rheumatica
gaagatccttgaaatccatttttataccctaaagtttgtggagttgtcatttgaatgtatgtgaatgaatttaaataattaatttcttaccgataggcatccagataattacagatgaataaatgca

SEQ ID NO: 7104 - DNA, 122 bp, Protomyxzoa rheumatica
tccgctcctttgaaactaacaaagtctctatctctctacaggtacatgtacatatatcatttaggaagaccttcccaattattacagcttgatcatttattctatcttctgagcttgtttta

SEQ ID NO: 7105 - DNA, 161 bp, Protomyxzoa rheumatica
aaatatttccttttccacaataggcctcaaagcacttcaaatatccacttgcagatgccttacaaagagtgtttcaaaactgctgtctcaaaacataggttcaacattttgagttgaatgttcacatgacaaagaagtttctcagaatgcttctgtgtagt

SEQ ID NO: 7106 - DNA, 125 bp, Protomyxzoa rheumatica
taccatcctggccaacatggtgaaatcccatctctactaagaatacaaaaattagctgggcctggtggtacacatctgtagtcccagctactcaggagtccgaggcaggaaaatcgcttgaaccc

SEQ ID NO: 7107 - DNA, 134 bp, Protomyxzoa rheumatica
atgttcaaaactgctcaatataaagaaaattttaactctgtgacatgaatgcacacatcagaaagaagtttctcagattgcttttgtctagattttaaatgcagatatatccttttctaccataggccccaagg

SEQ ID NO: 7108 - DNA, 128 bp, Protomyxzoa rheumatica
cagtaggcagagaccaggcaagagttggatcacctcgggaacagtgcagagatatatctcaatccccctatgtgcacagcctagacaagagttacatcacctcttttaacagtgcagagatatgtcaa

SEQ ID NO: 7109 - DNA, 227 bp, Protomyxzoa rheumatica
ggaatcatcatccaatggaatcgaatggaatcatctaatggacccgaatggaatcatcatcgaattgaatagaatggaatcatcatcgaatggaatctaatgcaatcatgtaatggacacgaatagaatcatcatggaatggaatcaaatggaatcatataatgtaaccaaacggaatcatcatcgaaaggaatcgaaaggaatcatcaaatgtaaccgaatggaat

SEQ ID NO: 7110 - DNA, 157 bp, Protomyxzoa rheumatica
gagtggatttatctatcttgttcctgatcttaggatataagtatacaggcttccaacattaagtacgttattggctgtggtttttcatatgccctttattagtttaaagatgttcccttctttccttctttgttgaatatttcatcatgaaaggctg

SEQ ID NO: 7111 - DNA, 142 bp, Protomyxzoa rheumatica
ccattctggtccattctattcaattccgttccattctattgcgttccatttgattccattctatacgaataaattccattccagatcattcctttcgtgtccattctatttgagtctattccattcgagtccattacatttg

SEQ ID NO: 7112 - DNA, 124 bp, Protomyxzoa rheumatica
cacagatcctcataccagggccagatcttacctcttcacacactgacagacccagatcttcatgcctataacagatttctaccttctcagacatggagagacccagatactcatacctgtacta

SEQ ID NO: 7113 - DNA, 159 bp, Protomyxzoa rheumatica
gcagtttctgagaatgcttctgtctagtttgtatgtgaagttatcccctttacaaagaattcctcaaagaactccaaatatccaatagcagattctacaaaggtgtatttcaaatctgctctaccaaaagaaaggttcaactctgtgatttgaatgcac

SEQ ID NO: 7114 - DNA, 187 bp, Protomyxzoa rheumatica
tagtaactaatcagaagcattcttagaaacttcgttgtgttgtgtgcattcaacacacagagatgaaccttccttttgacagaacagtttcgaaactctgtttctgtagaacctataagtggaaattaggagtgctttgagtccttctttggaaatgggaaatctacaaataaaaactagacagagc

SEQ ID NO: 7115 - DNA, 138 bp, Protomyxzoa rheumatica
ctttttgtagaatctgcaagtgtatatttggagtgctttgaagccttcgttgaaaacgggaatatattcacatgaaaactagacagaataattctcagaaacttcattgtgatctgtccattcaactcacagagttga

SEQ ID NO: 7116 - DNA, 142 bp, Protomyxzoa rheumatica
gtccgaatgtttgtgctcacataggattccaaagcactgctatgagattctgaatgtttttccatcacataatattccagaaaactgctacgagcgtctggaagtttgtgcctcacataggaccaaagaactctgctgctag

SEQ ID NO: 7117 - DNA, 125 bp, Protomyxzoa rheumatica
ttgtgcctgctcccacatcaaattctgccatgaataaatgtttcctgaggctctcaccagaagcagatgccagaaccatgcatcccataagacctgtagagccatgagccaattaaacctctttc

SEQ ID NO: 7118 - DNA, 128 bp, Protomyxzoa rheumatica
cttcatctattaatgtcctttttcctgctgttgtattgtatcctccactgtagtaaatcttcactagagtagaacttgatctggagtcacatgggtccttccagggaatcaccaaactagtcgtatgt

SEQ ID NO: 7119 - DNA, 168 bp, Protomyxzoa rheumatica
tgtgagttgaacgcacacttcacaaagtagttgctgagaatgattctgtctagattttttacgaagataactccttttctacccttggcctcaatgcgcttgaaatctccacctgcatattccacaaaaagtgtgtttcaaatctactctgtctaaaggaaggttcaa

SEQ ID NO: 7120 - DNA, 139 bp, Protomyxzoa rheumatica
agttctgtgagattaatgcacaaatcacaaaatggtttctcagatagcttgcttctactgtttataatgggatatacgcttatttgccttggcctcaaagagctcccaaatttccattctcagaatggacaaaacagtg

SEQ ID NO: 7121 - DNA, 135 bp, Protomyxzoa rheumatica
cactctttttgtagaatctgcaagtggagatttggagcgacttgaggcataaggtggaataggaaacatcttcacacaaaaactagacagtaatattctgcgaaacttcttagtgatatgtgtgttcatttcaca

SEQ ID NO: 7122 - DNA, 126 bp, Protomyxzoa rheumatica
aaacagattttccaaacagctgaatccagagaaagctttacatctgggagatgaatgaagacaccacaaagcagtttcttgggaagcttctttctagttttcaactgaagatatttcctttttcac

SEQ ID NO: 7123 - DNA, 133 bp, Protomyxzoa rheumatica
tttttgtgtgaagatatttccttttccacaatggacctcgaagtgctccaaatatccacttgtagaatctacaaaagagtgtttcaaaactgctcaataaattgaattgttcaagtctgtcaggtaaatgcac

SEQ ID NO: 7124 - DNA, 155 bp, Protomyxzoa rheumatica
aagctcctgtaggcagaacttagatgagttacatcacctgtgtgataagtgcaaaagtatgtcacaaagccccctgtagacaaagcctagacaatagatacatcacctaggtgatcagtggcgagatctctcacaattcccctgtaggcagagct

SEQ ID NO: 7125 - DNA, 126 bp, Protomyxzoa rheumatica
cagagatacatctcaatgtccctgtaggcagagccttgacaagttttacatcacctgagtgatcactgcagggatatatcaaaaagcaccctgtaggcagatccttgagaagagttatatcacctg

SEQ ID NO: 7126 - DNA, 128 bp, Protomyxzoa rheumatica
ctatcaaaagaaactttcaactctgtgggttgaatgcacacataaaaaagaagtttaggagaatacctctgtctagtttttatgtgaagatcgttcgttttccattatcggtcacaaagggaactaaa

SEQ ID NO: 7127 - DNA, 152 bp, Protomyxzoa rheumatica
gtgcattcaactcacagagttgaaactttcttttgattgaccagtttggaaacattattttttcagaaactgcaagtggatatgtggagccttttgcggcctaaggtggaagaggaaatatcttcacataaaaactacacagaagcattctg

SEQ ID NO: 7128 - DNA, 147 bp, Protomyxzoa rheumatica
accaaggtcttagagtttcacagtgttttctctccaatagctaatagaaggagcattgctgacattctgcccatggttgccaaggctgaaatcaaacgtgctttgaataacactataaaaactttgcaattaacctttgccgttgga

SEQ ID NO: 7129 - DNA, 129 bp, Protomyxzoa rheumatica
gatattgcctttctcaccataggcctcaaagggctctgaaatatcccttttgcagattgtacaaaaagacggtttcgtaactgctcaatcagaagaagggttcaactctgtgagttgcatgcacacgaa

SEQ ID NO: 7130 - DNA, 133 bp, Protomyxzoa rheumatica
aaaccttacatatgaaatgaatgttgaaaaacctttcatggcaagtcattcctcaccgtacaccagagaactcacacaggggagaaacagtatggatgaaccaaggtggaaaaactttttgtcagaaatcata

SEQ ID NO: 7131 - DNA, 168 bp, Protomyxzoa rheumatica
ccccatagacagaacctagacaaggcttcaatctcttgggtgatcaatgcagagatatgtcacaaaacgccctctaggcagagtatagagaagagtcccatgacctgggagatcagtgcagagatatttcacaaagccttctgtaggcaaagcccatacaaggcttac

SEQ ID NO: 7132 - DNA, 128 bp, Protomyxzoa rheumatica
gaagaattctcagaaagttctttgtgatgtgtttattcaactcacatagttgaacgttcctttgatacagcagtgttgacatatactttttgtggcatgtgcaggtgttcatttgtagcgctttgggg

SEQ ID NO: 7133 - DNA, 150 bp, Protomyxzoa rheumatica
aggcctcaaagccctccaaatatccacttccaaattctaccgaaagagtgtttcaaaacttctcaatcaatagaaagttcaactctctgtgatgaatacactcatcacaaagaagtttctctgcatgcttctgagtagttttatttgaag

SEQ ID NO: 7134 - DNA, 148 bp, Protomyxzoa rheumatica
tctccagcatctgttgtttcctgaaattttaaagatcgccattctaactggcgtgagatgatatctcattgtggatttgattcgcatttctctgatgaccaatgatgagcaatttttcatatgtctgttggctgcataaatgtcttcc

SEQ ID NO: 7135 - DNA, 211 bp, Protomyxzoa rheumatica
attccattccattccattccattccattccattctattgctttcttttgacagaatctcactctgtcacacagcctggagtgcagtggcacaatttcagctcacatttcatttcaccattgcattcaatttcattccattccgttccattccactacactccactcgacaccactccattcctttccactctactccactccactgctctc

SEQ ID NO: 7136 - DNA, 327 bp, Protomyxzoa rheumatica
aactggaattgaatggaatggaatggaatgtgacggaatcatcccgagtgggatggaatggaatggaatggaatgcaatagaatgcaatgcaatgggatggaatggaatggaatcctcccgagtggaatggaatggaatgcaatggattggaatgtagaggagtttagagcagtagagtggagtggaatggaatggaattgaatggagtagaggggagtggtgtggagttgagtttagtgtagtggaatggagaggagtggggaaacgtggagttgagtggagtggagtggaatgcaacggagtgtaatggaatggaagggaatgga

SEQ ID NO: 7137 - DNA, 130 bp, Protomyxzoa rheumatica
cagatacattctttctagtttttatctggggatatacggtttgtcaccatagttctcaatatgctccaaaatatcccttcatagattctacaaaaggactgtttccaagctgctgaataaaaagaaaggt

SEQ ID NO: 7138 - DNA, 130 bp, Protomyxzoa rheumatica
acaccctaatccttggacttcctagcctccagaactctaagaaataaatttattttctttatagattccctagtatatgatattctgttatagcagcagaaaatgtgttaaaatgtcccatttcatggag

SEQ ID NO: 7139 - DNA, 131 bp, Protomyxzoa rheumatica
agccaggaggcctgcacggacagccagccagcggctcttataaaggcccgcagggaggcaggcaggctccaccctttcatgaatggcagtgagccctaggacagcccgccccaccccggaagggtcccagg

SEQ ID NO: 7140 - DNA, 124 bp, Protomyxzoa rheumatica
cattcatttccacgtaggagaccagagcgagagcccagaaagaaggtgcctccccgacgtgatggcctgacgatggattcccgtgtgctgcaacatggggagtctgcagtttggccgatttgga

SEQ ID NO: 7141 - DNA, 167 bp, Protomyxzoa rheumatica
tgaaacatccttttgattgagcagctttgaaacactcgttttggagaatctgcaagtagatatttggagcgccttgccacctattggggaaaagaatatatcttcatataaaactacacagtagcattcggagaaacctctttgtgatgtgtgcattcatctcacag

SEQ ID NO: 7142 - DNA, 144 bp, Protomyxzoa rheumatica
tgataaagtcgtgctgttttgctaggctggcagtgttgatctgcctttagggatgagctgatgctgatgtacatagtagtcatgaccaagaggatgttagtatttattcccctcagcttcaaaaactttatacaggcttgttcc

SEQ ID NO: 7143 - DNA, 487 bp, Protomyxzoa rheumatica
cagattctacaaaaagactgtttccaaactgctcaatcaacagaaagtttcaacccggtgagtagaagtcacacatgacaaaatagtttctcagaaagtatctgtctagtttttatgtgaagatatttcctatcaccccagaagcctcaatgggctcacaaatattcctttgcagattctacaaaacgacagtttcaaaactgctgaatcaaaagaaaggttcaactctgggagatgaatgcacagatcacaaataagttcctcagaatgctgctgcctagttttaatgggaagagatttccttttccaccataggcctcaaagctctccaaatagccatttgcagatactgtaaaaagactgtttccaaactgctgaatcaaaagaaaggttgaactccatgagttgaatgcacacgtcacaaagaagtttctcagaatgcttctgactagtttttatgtgaagatattttcttttctaccatagg

SEQ ID NO: 7144 - DNA, 127 bp, Protomyxzoa rheumatica
tactttttgatgtgtgtactcaactcacagagttaaactcttcctgtgatacagcagattttaaaaactcttcttttggaatttacaagtgcatatttgtacaacattgaggatttcgttggaatcg

SEQ ID NO: 7145 - DNA, 125 bp, Protomyxzoa rheumatica
ccttgtccaaactctgcctacaggggcgtttccacatatccctgaagtgatgacaaaggtgatgtaactcttgcctgggctttgcctacaggaaacattggacatatatctgcactgatcaccca

SEQ ID NO: 7146 - DNA, 119 bp, Protomyxzoa rheumatica
tacttaccatagcttctttcaaatcttatctactgattacagcatcttgcacatcttgagaataggttctattgtctgctttttatcttgtgaatcgattacattttcatccttcttca

SEQ ID NO: 7147 - DNA, 150 bp, Protomyxzoa rheumatica
atgattctgtctagtttttctatgaagatatttccttttccacaataggcctcaaagtgcttcatatatccacttgcagattctacaaaaagaccgtttccactctgctcaatcaatagagagtttcacctctgtgagatgaatgcacac

SEQ ID NO: 7148 - DNA, 134 bp, Protomyxzoa rheumatica
caatggaatggaatgaaatggagtggaattgaatggaccaaaacgtaacagactcgaatggaatggactcaaaaagaatggtctcaaaagtaatgatctcgaaaggaatttattcgaatagaatggaagcgaaa

SEQ ID NO: 7149 - DNA, 125 bp, Protomyxzoa rheumatica
tgcactgcagcctgggtgacagagggagaccttgtctcaaaaaaacaaagaaaagaaataatgcaaaccacaggatagtggagtgacttcgataaaatacataaggataaaacgattgccagtct

SEQ ID NO: 7150 - DNA, 131 bp, Protomyxzoa rheumatica
ccattacattccattccgttgcattggaatcgcgttgattctaatccattccattacattccagtcctttcgattccattacattccactcggtttgtttccactgcgttgagttccattccattccattc

SEQ ID NO: 7151 - DNA, 122 bp, Protomyxzoa rheumatica
ttttttgtgatgtgtgcattcaacacagtgagttgatccctcctttcgatagagcagttctgaaatactctttttgcagaatttccaagtggatgtttagagcagttcaaggcctgtgctag

SEQ ID NO: 7152 - DNA, 122 bp, Protomyxzoa rheumatica
aggggtcgctttgcacaggccgcctgactgcgcggacgccctgccagcatgtcccgggtgccttgcccttcgattctgaaaccacatctgaatcctgcactccgggaggcctgtctctctgg

SEQ ID NO: 7153 - DNA, 124 bp, Protomyxzoa rheumatica
acaattttctgggatttgtctacagggactttgtgacatatctttgcacttatcaccaaggagatgtaacaactcttgtctaggctcggccaacaggggctttgtgacatatttctgcactgat

SEQ ID NO: 7154 - DNA, 192 bp, Protomyxzoa rheumatica
tcacagagttgaacgttccttttgattgagcagattagaaacactctttttgtagaatttccaagttgatatttagatcgctttgaaccctatggtagataaggaaatatcttcatataaaaataatcagaatgattcccagaaactgctttgtgatgtttgtgttcaactcacagagtttaacctttcttt

SEQ ID NO: 7155 - DNA, 162 bp, Protomyxzoa rheumatica
ggcctagttttcagcctacctctgctgttgacagcctttcacactaagcttaatcatttctagcttttgttttagagtgagagacgggcaagtctttctttcacatgaacactttgaggccactgtgggatcatgaactggagtgacttcaatcctgttgtg

SEQ ID NO: 7156 - DNA, 124 bp, Protomyxzoa rheumatica
cctgggcccagggtggctttaaatgctgcccaacacaaattcgtaaactttcttaaaacatgagatttggtttacgatttttttttttaactcatcagctatcattagtgttattaaattttat

SEQ ID NO: 7157 - DNA, 141 bp, Protomyxzoa rheumatica
aaaagaatccttcatcaaaactgagagaatgagcaagcattcatctccatggcacatttatataaaaagaaaggagagatgttgagggaagtcagggaccccaaaatggagggaccggctggagccatggcagaggaacat

SEQ ID NO: 7158 - DNA, 129 bp, Protomyxzoa rheumatica
tggaatcgaatggaatagaatggtcacgaatggaatacaagggaatgaaatggaacggactagaagggaatggaatgcaatggactagaatggaatagaatggaatgaaatctacaggaatagaatgga

SEQ ID NO: 7159 - DNA, 136 bp, Protomyxzoa rheumatica
ctttgacatagttccacttgttcatttttgcatttgttgactgcgctcctgctgtcaaatccaaagtatcattgccatgaccagtgtcaaggaggtttttccccatttttttagaggattcatgatttcagttctt

SEQ ID NO: 7160 - DNA, 133 bp, Protomyxzoa rheumatica
aaaagaaataccttcatagcaaaactagaaagaagctttcagaaaaactactttgtgatgtgtacattcatctcatagagataaatctttcttttaatgaggcagcttggaataactatttttgtataatctg

SEQ ID NO: 7161 - DNA, 132 bp, Protomyxzoa rheumatica
tttaactctgtgaaatgaatgctcacatcacacagctgtttctcagatagatcccatctagtttttattcaaggatcttctcttttttgccattggccacaaagagctctgaattatccattcaaaaaatgg

SEQ ID NO: 7162 - DNA, 133 bp, Protomyxzoa rheumatica
tccgtcacctgggtgatcattgcagaaatgagtcacaatgccccattaggcagagcctagacaaaaaccccatcacctggatgataagtgcagagttatgtcacacaggccctttaggcacatcctagacaat

SEQ ID NO: 7163 - DNA, 153 bp, Protomyxzoa rheumatica
taggcctcaaagggctccctaacatccctcttcagattctacaaacagactgattccaaacagctcaattgaaagaaaggttcaacagtgtgagatgaatgcacacatcataaagaagtttctcagaaagattcagtctagtttttatatgaa

SEQ ID NO: 7164 - DNA, 158 bp, Protomyxzoa rheumatica
taggacctgcaagtggatatttggagcgctttgaggcctctagtggaaaaggtaatatcttcacataaaaactggactgaagagttgtgagaaatttcgtggtgatgggtgggttcatctcatggagttgaaccttttttctgattgagcagtttgga

SEQ ID NO: 7165 - DNA, 144 bp, Protomyxzoa rheumatica
tgagaaacttctttgtgatgcatgtgttcatctcacagatttgaacctttgtttagattgattagtttggaaacactctttttgtaaaatctacaagtggacatttggaaccctttgcggcctaaggtagaaaagaaatatctt

SEQ ID NO: 7166 - DNA, 163 bp, Protomyxzoa rheumatica
tccattccattccattccattccattccattcctttccattccactctattccattccattccttacattcgacaggatttcactctgtcacacagtctggagtgcagtggcagaatctcaggtcacatttcatttcactattccattccattccattccatt

SEQ ID NO: 7167 - DNA, 203 bp, Protomyxzoa rheumatica
aaacccaaaaaaacaaaaacaaaaactgcttttcactaggggtaacagaacactcagctggcataggtgtgaagtttattttaaaacattcacctagcgagaaatccagagcagcaggtctggggttcttgcaatggcccatcaggtcttccccacagggctcagactccttctgtcttttccccgtccaccatttttagcat

SEQ ID NO: 7168 - DNA, 129 bp, Protomyxzoa rheumatica
agttagaagtttctttggattttgcagtttggaaacattgcttttgtagaatctgcaaagggatttttcagagagcattgaggtctatgctggaaaagtaaatatcttcaaataaaaactagaaagatg

SEQ ID NO: 7169 - DNA, 129 bp, Protomyxzoa rheumatica
atcgaatggaaaggaattgaatggaatggaatcgactgaaatggaataaactcgaatggaatggactagaatggatagttgtcgattgaaatggaatggaattatattgaatgaaatggaatgcaatgg

SEQ ID NO: 7170 - DNA, 143 bp, Protomyxzoa rheumatica
agaatctacaagttgatacttggagcgctttgtggcctacaaaggaaatggcaatatcttcatataaaaacgagacataaggattctcagaaactactttgtgaagtgtgcattaaattcagagagttaaagcttccttttga

SEQ ID NO: 7171 - DNA, 173 bp, Protomyxzoa rheumatica
ctgctctctcaataggaagtttcaactctctgagttgaatgaacatatccaaggaagtttatgagaatgcttctgtctagttttcatgtgaaggtattcccatttccaccgtgggcctcaaagcactcaaaatatccacttgcagattctacaaaaacagtgttccaaactgc

SEQ ID NO: 7172 - DNA, 140 bp, Protomyxzoa rheumatica
tctttttgtaggatgtgcaagtgggtattttgagggctttgaaacctattgtggaaaaggatatatcttcatataaaaattacacagaagcattctgagacacatctttatgatatatgcattcaactcacatagttaaa

SEQ ID NO: 7173 - DNA, 205 bp, Protomyxzoa rheumatica
atccagaccattgtaacattgttctggaatcctatgtgagaaaaacaccttcaaaacacagcagtagtattctggagatctatgtgcgagacaaacatacagaccctcgaaacagtgttctggaatcctaggtaagggaaaaacatttagacccacatagcagtcttctggaatcgtacgtgaggaacaaacattccgaacccaa

SEQ ID NO: 7174 - DNA, 228 bp, Protomyxzoa rheumatica
atccattccattccattcctttcagaacaattccaatccattcggttccatttttttccactccaatctattcgagaccattccattccattgcattccattccattccttttcattccattccattccattgaactccattgcactcgattccactctgttccattccattgcacttcactctataccattccattgcattcctttccattccatttgattacattc

SEQ ID NO: 7175 - DNA, 124 bp, Protomyxzoa rheumatica
tttgactccatttgatgatgattcaaatcaaagattccattcaattctattcgatgttgattccattagatatcgttcgacgctgattccatttaattctattcgattattccatttgattcca

SEQ ID NO: 7176 - DNA, 142 bp, Protomyxzoa rheumatica
ggaatcgatcagaatcatcatcgagtagaaacaaatggaatcatcaaatggaatagaatactgtcatcatcgaatggaatcgaatggaatcatcatcgaatagaatagaatggaatcatcaaatggaatcgaatggaatcat

SEQ ID NO: 7177 - DNA, 385 bp, Protomyxzoa rheumatica
tactttttatacgtaatcccgtttccaacgaaatcctccaggctatccaaatatccacttgcagattccacaaaaagagtgtttctaaactgctctatcaatggcaaggttcaactctgtcagttgaggatacacatcacaaacaagtttctgagaattcttcaatttttttacgggaagacatttcctttttcaccgtaggcgtcaaagcgatcgaaatgtcttcatccatacaatacaaaaagtgtgtttcaaacctgctccacgaaagggaatgttcatctctatgtgttgaatggaaatatcagaaagaaatttctgagaatgctgctacttttttatgaattcccgcttccaacgaaatcctcaaagcaatccaaatatc

SEQ ID NO: 7178 - DNA, 181 bp, Protomyxzoa rheumatica
agaagagataaaacagaatcatagaaaatgctcaattaaaaccagagaagacagaaaaagttggagggaaaaggagcaaaggataatcacaatataaaaaagttgcaaacatgaattcaacaatatcgataatcactttggatgcaaatggtctcaatataccaattataagacagaaacg

SEQ ID NO: 7179 - DNA, 275 bp, Protomyxzoa rheumatica
gaccctcatatcagtgttctggaatcctaagtgaagaacaaacaatcagaacccagcagcagtgttctggaatcctttgtcagggaaaaacattcagatcacagaaggagtgttctggaatcctatgtgagggacacacattcagaacacagcatcattgttctggaatactatgtgagggacaaactttcagaccactgcaggagtgttctggaatccgatgtgagggacaaactttcagaccccagaagaagtgttctggaatcgtatttgaa

SEQ ID NO: 7180 - DNA, 136 bp, Protomyxzoa rheumatica
attgtgccactgcactccagtctgggtgacaatgtgagatccagtcgaaataaagggatggaatggaatggagtaaaatggaatggaataaagtggagtgaaatggaatggagtggaatgtagtggagtggagtgg

SEQ ID NO: 7181 - DNA, 139 bp, Protomyxzoa rheumatica
aaatgaaaggttcaattctgtgagatgaatgcacacatcacatagacgtttctcagaatacttctgtgttgtttttatgtgaagatatttcctttccacgatagaccacaaagggacccaaatatccacttgcagattc

SEQ ID NO: 7182 - DNA, 124 bp, Protomyxzoa rheumatica
gcataccaatccactccactccactcgactcaaatgcattgcaattccattgcattccactccactccactgctttcccctccgttcaattacattcctacccattccattccattccactcct

SEQ ID NO: 7183 - DNA, 152 bp, Protomyxzoa rheumatica
aggcctattgtggaaaaggaaatatcttcacataaaaatttcacagaagcattctgagagactactttgagatgagtacattcatcacacagattgtagatgtcttctgatcgagcagttttgaaacacactttttgtagaatctgcaagtg

SEQ ID NO: 7184 - DNA, 151 bp, Protomyxzoa rheumatica
attcaatgatgattccattcgtttccattcgatgaaaattcctttggattccattcggtaatgattccattccactacatttgatgttaattcatttcgattccattcgatgatgattccatttgatgatgattccgtttgattctatttg

SEQ ID NO: 7185 - DNA, 138 bp, Protomyxzoa rheumatica
atcttggaggtaatgagtgaactggttgttaaaaagagcacccgctgccctttcttcctctcccaccatgtgatctctgaacatcctggctcccctacaccttccgccatgagtggaaacagcctgaagccctcactg

SEQ ID NO: 7186 - DNA, 131 bp, Protomyxzoa rheumatica
gattgcaccattgcactccagcctgggtaacaagagcgaaactccatctcaaaaaataaaaaataaataaacacatatagggccgggtgcaatggctcacacgcctgtaatcccagcactttgggaggcca

SEQ ID NO: 7187 - DNA, 166 bp, Protomyxzoa rheumatica
agttaattcttgcatatggtgagaggtagaaatctagtttcattcttctgcaaatggttagccagttttcccagcatcatttatggaatagggggtcctttccccattgttcatttttgttgactttgtcaaagatcagttagttgtaggtgcgtagctttatttc

SEQ ID NO: 7188 - DNA, 157 bp, Protomyxzoa rheumatica
cattgtgatgtgtgcgttcaactcacagagtttaaactttctgttcatagagcaattttgaaacacactttttatagaatctgcaagtgaatattcggacttttttgaggccttcgttggaaacgggatttcgtcatataaaacttgatagaagaat

SEQ ID NO: 7189 - DNA, 130 bp, Protomyxzoa rheumatica
cagcagtttgcaaacactgtttttatagaatctggaaagggatatttcggagatcattgaggcctacgttgaaataggaaacatcttcagataaaatttagaaataagtcttttgaaaaactgctttgtg

SEQ ID NO: 7190 - DNA, 153 bp, Protomyxzoa rheumatica
actcccagtttcatctcacctcaggaccatcaacagactcagcctggtttttccctccctgagctgtggcctagaaacggtttccattccctgattcccttctggtcaccgcacctgggcagtccagagtcatgagaaaccctaggccatgtg

SEQ ID NO: 7191 - DNA, 292 bp, Protomyxzoa rheumatica
attccattcaagtccattctatgccagttaattccattccagtcctttccattctactccattccattggattccattccattatactctattcctttcaattccatccatttgattcccttccattctactcaattccattcgattccactgcattcgagtccattccaatggagtcccttccattcctgtccattcctctccagtccattccattcgagtccattccattgcagtccattgcatccgagtcctttccattctattccattcgatatctttacattaaact

SEQ ID NO: 7192 - DNA, 144 bp, Protomyxzoa rheumatica
tagcattgttctggaatcctatgtaaggaaaatacattcaaagcacagcaggagtgttctggagtcctatgtgcgtgacaaacattcagaccctcgtagcagtcttctggaatcctacgtgaaggaaaaacatttagtcccacg

SEQ ID NO: 7193 - DNA, 140 bp, Protomyxzoa rheumatica
cgaatgtcatcatcatcgaatgaaatcgaacagaatcatcatccaatggaatcaaatggaagcatattcgaagagaatccaaaggaatcatcattgaatggaaccaaaaggagtcatcatcgaatggaatcgcatggaat

SEQ ID NO: 7194 - DNA, 136 bp, Protomyxzoa rheumatica
ctttctgagaaactactttgtgatgtgcgctttcttctcacagagttaatcatttcttttgattgagccatttggaaatacggtttttgtagaatctgcaaagggatctttggaagcacactgatgcctatgatga

SEQ ID NO: 7195 - DNA, 138 bp, Protomyxzoa rheumatica
ggaaaaattgtgcttcttaaaatgtcttaaaacaaatttgttaaatattttattactgattatttttaaatgatgtatatcctaaaaaatcaggaaccacgtattaaaatgtttaaaatgttaaaatattagaacaat

SEQ ID NO: 7196 - DNA, 184 bp, Protomyxzoa rheumatica
gagtgcattcaatgattccattcaattccagtcgatgatggttccattcgattccattccctgatgattgctttcgattccattcgatgatccccttcgattccattcaaagttgattccattcgagtccattcgattattcctttcaattccattctccgatgatttcattcgagtccatttg

SEQ ID NO: 7197 - DNA, 164 bp, Protomyxzoa rheumatica
ttctcagaatgcttctgttctttttttatgttaatatatttccttttacaccacaggccacaaagggttccaaatagccacttgcagattctgcaaaatgagagtttcaatactgctctgtcaaaagataggttcaactacgtgaattgaatgcacacatcaca

SEQ ID NO: 7198 - DNA, 128 bp, Protomyxzoa rheumatica
gagagctttgaggcctgttgtggaaaaggaaacatcttcacataaaaattacacagaaacattctgagcaacttctttgggatgtgtgcattcaactcactgattagaaactatattttgatggagga

SEQ ID NO: 7199 - DNA, 142 bp, Protomyxzoa rheumatica
atcatgacgaactgaatatcctgaaacaaaaactagacagaaggtatctgtgaaactactttatgatgtttggattcatctcacagacttaaacgtttctttggattccatcatttggaaacactatttttatagaatctac

SEQ ID NO: 7200 - DNA, 191 bp, Protomyxzoa rheumatica
cacattccacagtactaccagctttgcttcttcaatcaccaccactgacaacacctcacacagtatgcccagcttcacttcttcggtcgccaccactgagatcatctcacacagtactcccagcttcccttcttcaatcacgaacactgaaaccatatcacacaggactcccagcttgacttctgcaatca

SEQ ID NO: 7201 - DNA, 125 bp, Protomyxzoa rheumatica
cgggatgttgatcagttccagaggttaagacagtttccaaatatttaagtctttcagtcaaaatctgaaccctgtgtggtgatgccctatatctgcaagttcccaggaaatttaccaacttaaca

SEQ ID NO: 7202 - DNA, 270 bp, Protomyxzoa rheumatica
attccattcgagttcattcagtgattcctttctatgccaattgaagatttttccattcgagtccattcgatgataccattcgataccattcgttgatgattccattcgagtgcatttgatgataccattcgattccatttgatgatgattccattcgatgattccattcaattccattctataagaatttcattcaagtccatttgatgattccattggactccatttgatgattcaattggactccatttgatgatgattccattcaat

SEQ ID NO: 7203 - DNA, 146 bp, Protomyxzoa rheumatica
ctcaaatctatccaaatatcctcttgcagattctacaaaatgcgtgtttcaatactgctctatcgaaagaaaatttcgtctctgttagttgagtgaacacatcacaaagatttttctgagaatgcttctgtcttgtttttattgga

SEQ ID NO: 7204 - DNA, 155 bp, Protomyxzoa rheumatica
tcctttcaattccattcaatgatgattccatttaattccattcgatgattccactcgattccattcgatgattattccaatggagtccatttggtgattaatttagattccactcgaagatgattccatttgattccattcgatgataccattcg

SEQ ID NO: 7205 - DNA, 150 bp, Protomyxzoa rheumatica
agtagtttctgagaatgcttctgtctagtttttatagtttttatatgaagatattttctttactaacacaggcctcaaaacactccaaatatccacttgcagatcattcaaaaagactgtttcaaagctactctatcaaaaggaaggttc

SEQ ID NO: 7206 - DNA, 182 bp, Protomyxzoa rheumatica
tatttctactgtgattactccttctcccaccataaacagtacaaaacaaactacgtcttatctaaaatacatataagacacatggacacacaaaagagtgaattcccagattcttgttttttgaccctgggctgatgctttgacttgaggaaatatgtgtcattacaggggttggtgtcctt

SEQ ID NO: 7207 - DNA, 133 bp, Protomyxzoa rheumatica
catcgcctaggtgatcagcgcatagatatgtgaaaatttccgtgtaggcagagtctagacaagtgttatatcacctaggttatcagctcaggaataagtcataaagcctcctgtaggcagagcgtagaaaaga

SEQ ID NO: 7208 - DNA, 167 bp, Protomyxzoa rheumatica
cacacacacacacacacacacaccagttataactggtcacttctctctatcttgttcctagagtctgccatcagtacctgactacctaaagcacctgagctcatccattatttctagggacaacaaaggcatttcagattcactaatagaatctgaccattctgaac

SEQ ID NO: 7209 - DNA, 123 bp, Protomyxzoa rheumatica
cacacagcacacacacaccacacatacaccatacacaccatacaccacacacacataaccacacacttcaaactccataccacacacacaggtattagtgctttatgttttgtttattttgtc

SEQ ID NO: 7210 - DNA, 182 bp, Protomyxzoa rheumatica
agtttcaaaactgctctatcaaaatatatattcaactctgtgagatgaatgcacacctcagaaacaagtttctcagaatgcttctctgtagtttttacttgaagatatctccttttccaccataggcctcaatgtgctcaaataccacttgcagtttctacaaaaagagtgtttcaaaactg

SEQ ID NO: 7211 - DNA, 142 bp, Protomyxzoa rheumatica
agaacggaatggaatgtaatgcattggaaaggaatggaatcaaccacagtggaatagaatggaattgattgtaacggaatgcaaaggaatggaatagagtgaaatggaatcaccccgtgtggaatgtaatggaatagaatgg

SEQ ID NO: 7212 - DNA, 160 bp, Protomyxzoa rheumatica
attctattccattcgactccattgaattccatactatcgtattccactcgagtccattgaattcaagtccattcacttccattccattactttcctttcctttccatgccattgcatttgattctattccattcgactccattgaattccatactatcgt

SEQ ID NO: 7213 - DNA, 319 bp, Protomyxzoa rheumatica
tggactcgaatggaatggaatggaatggacaggaatggaatggaatggaatagaatggactgtaatggaatggaatgggatagaatggaatggaatggacttgaatggaatagaatggaaaggaatggaatggactcgaatgatatggaatagaaaggactcgaatggaatggaatggactctagtggaatggaatggaatagaatggagtcgaatggaatggagtggaatggattcgaatggaattgaacggaattcaatggatttgagtcaaacggaatgtaatggtatggaatggactcgaatggaatggaatgga

SEQ ID NO: 7214 - DNA, 141 bp, Protomyxzoa rheumatica
tattctttttgtagtatttccgagtggatatttagagcggttcaaggccaattttataaaggtctatatcttcataggaaaactagacagaatcattctcagaaactagtttgagatgcttgcattcaacttacagaattt

SEQ ID NO: 7215 - DNA, 161 bp, Protomyxzoa rheumatica
taataatcaacttgtcaaaactcaaagacaaacagaatttcaggagcagtaagataaaagcaactaatcacatacaagagagcttttgtaagaatacaaataaatttctcagcagacatcttataaggattgtgattatctttttgaggtgttaaaagtaa

SEQ ID NO: 7216 - DNA, 139 bp, Protomyxzoa rheumatica
caactcacagagttgaatctttcttttgattggacagatttgaatctctctttttgtagaatccacacgtggatatttggagccctttgcagcctttggtggaaaaggaactgtcttgaaataaaagctacaccgaagc

SEQ ID NO: 7217 - DNA, 152 bp, Protomyxzoa rheumatica
ctgataaactactttgttatgtgtggattcaactcacagagttgaacctatcttttgattgagccactttgaaactctctttttatagtatctgcaagtggatatttggagtcttttgtggcctattgtggaaaaggaaatgccttcacata

SEQ ID NO: 7218 - DNA, 222 bp, Protomyxzoa rheumatica
caaccccgtgagatgaatgcacatatcaggaagaagtttcacagaatgcttctgtctaatttttatgtgaagatattttgttttccactataggaatcaaagtgctccaaatagccacttgcagattgtaaaaaaagactctttcaaaactgctcaatcaaaagaaaggttgaagcctgtgagatgaatgcacacatcacaaagaagtttcccagatgcttc

SEQ ID NO: 7219 - DNA, 129 bp, Protomyxzoa rheumatica
cttgatagagcagttttgaaaccctctttttgtagagtctgcaattggatatttgaacctgtttgaggccttcgttttaaacgagatttcttcatatcaactagacagaagaattctcagaaacttctt

SEQ ID NO: 7220 - DNA, 135 bp, Protomyxzoa rheumatica
taggccaacttggtttccttccctagaaccaggaatcaattttcatcttacttaaatgaaagacaccataggtgaactctctgtcttctaaggcctcttccaaacttcagaggctataattgtctagcaaaaaaa

SEQ ID NO: 7221 - DNA, 141 bp, Protomyxzoa rheumatica
agttggttttcagtttgaccaacagccatcaccttggctacagagataagtgagaaatgagtgaaacagacccgctctgttaactctttcctcccactcttgtaaaaggtatctctagacccagatagtttcactggagac

SEQ ID NO: 7222 - DNA, 137 bp, Protomyxzoa rheumatica
cattcgatgattccattcgaactcatttgatgattccattcgaattcatttgatgatgattcctttcgattctattcgatgattcctttcgatgatgattccagtcaatgccatccgatgattccattcgagtccat

SEQ ID NO: 7223 - DNA, 125 bp, Protomyxzoa rheumatica
acaagaacagagattacagactgatcagagaaaataaacttttacttctgtgagatcagtgcacacatgacaaagctgttgctaagaacccttctttatacattttatatgaatatatttccttt

SEQ ID NO: 7224 - DNA, 172 bp, Protomyxzoa rheumatica
cgatctacaattttcaaggggaatacttccagattttgcccattcagtatgatgttggctgtgggtttgtcatatctctaataacttgataaatgttgtgccacaatagttttggtctatatggtttcagaggcaaaatccactgtcatttaaattggcattcccctataag

SEQ ID NO: 7225 - DNA, 188 bp, Protomyxzoa rheumatica
atcagtgcagacatatgtcacaaatctctctctatgcagagtatagacaaaagccccttcacctggatcatcagcgcagagtaatgtcacaaaatcccttttggcagatcctagaaaagagttacgtcacttggatgatcagtgcagatatatgttacaatgccactgtaggcagagcctagacaaga

SEQ ID NO: 7226 - DNA, 131 bp, Protomyxzoa rheumatica
tgaatccacacaacacaaagcagtttaacagatagcttcttcctagtttttaatctgaggatatttgatttttacttataggccttattaggctcccaaatgtcttttctcagattctacaaaagcagcgt

SEQ ID NO: 7227 - DNA, 168 bp, Protomyxzoa rheumatica
agactgtttcaaacctgctctgtgaaagggaaggctcaactctgtgacttgaatacaaacatcacacagatgtttctgagaataattctgtctagattttatatgaacattttcccatttccaacgaaatcctccaacctatcaaaatatccacgttcagattcaaca

SEQ ID NO: 7228 - DNA, 143 bp, Protomyxzoa rheumatica
gattgcattccattcaaggccattccatttcattccattctattttgttcggttccaatccgtgcaattccattttcttccagtctattccattcgaggccattccattccggtccatgccaatcaattccattccatttgat

SEQ ID NO: 7229 - DNA, 173 bp, Protomyxzoa rheumatica
atgtttgtccctcacataggattccagaacactgctacgaaggtctgaatgttgctccctcacatgggattccagaacactcctgctgtggtgtgtttgttcctcacataagatttcacaacactcctgctgtcttctgaatgtttgtccctcacataggattccagaacact

SEQ ID NO: 7230 - DNA, 247 bp, Protomyxzoa rheumatica
ctgctactggatatttggagccctttgcagccaatggaggaaaaggacatatcatcaaatagaaactacatagaagcattctgagaaacgtctttgtgttgtgtgcattcatctcacagggttgaacacttcctttcagggagcagttttgaaacagtatttttccagaatctgcaagtggatatttgtagagctttgagacatgttgtggaaaaggaaatatcttcaaataaaaactacacagaag

SEQ ID NO: 7231 - DNA, 173 bp, Protomyxzoa rheumatica
tagaaaaagagtgtttccatcctctaaataaaagaaagttttaattgtgtgcgatgaatccacacatcacaaggcagtttcacagacagcttcattccaatatttatctggggatattcaattttttcaaataggtctcaaatgcctaccacatttccctttgcagattctat

SEQ ID NO: 7232 - DNA, 124 bp, Protomyxzoa rheumatica
tggagtggagtggagtggagtggagaggaatggaatggaatggtatggaattgaatggtgaaatgaaatgtgagcagagattgggcctctgcgctccaggctgggtgacagagtgagataatct

SEQ ID NO: 7233 - DNA, 127 bp, Protomyxzoa rheumatica
gaagatatttccttttcctccataggccacaaggggctccaaatatccacatgcagattctacaaaaaaagtgtttcaaaactgctcgatcaaaagataggttcagctttgtgagttgaatgcacac

SEQ ID NO: 7234 - DNA, 124 bp, Protomyxzoa rheumatica
cagattctacaaaagagtgtttcaaagctgctcaatcgaaggaaaatttcaactctttgtgatgtatgcactcatcacaaagtagtttctgtgaatgcttctgtgtagtttttatgtgaagata

SEQ ID NO: 7235 - DNA, 147 bp, Protomyxzoa rheumatica
ttcaccataggcctcaatgtgctctcaaatatcactttccagattctacaaaaacagtgtttcccaactgctgaatgaaaataaattttaactttacgaggtgaatgcaaacatcactaagccgtttctcagagagcttctttctag

SEQ ID NO: 7236 - DNA, 129 bp, Protomyxzoa rheumatica
gtaatcattaaatggactcgaatggaatcatcgaatggacatgaatggaatcatcatcgaatggaatcaaatggaatgatcgattgtactccaatgtaatcatcaaatggactcgaatggaatcatcat

SEQ ID NO: 7237 - DNA, 286 bp, Protomyxzoa rheumatica
ctctacatgaaatatcaaagttcacaaactatatattatatactgttcataaaatatgaaattacatcaaatatattttatattaggtacataaactatgaaagtacatcatatatagattatatactgtacattaaataccaaagtaccccaaatatatattttatactgtacatggaatatcaaagttcacaaactatatattatatactgtacataaaatatcaaatcacccatggtatctactctatactgtacaaaaaatatcaaagtacccaaagcatgt

SEQ ID NO: 7238 - DNA, 199 bp, Protomyxzoa rheumatica
gagatatttttagcctttcagttgttttcagacaattttgcagtagctttaatttagctaatccttggatggattactacataaaaaattttaagtggtttacagaatagggtgtccaatacaatctatttttgacaaaaagaaatagatatgcacaaaaaggaatgtcagctgtcagctgctatcccaagtgctatga

SEQ ID NO: 7239 - DNA, 136 bp, Protomyxzoa rheumatica
tggagtggaatggaaaggaacggggtagaattgtgtggggtggagtggagtgctatgcgatggaatagaaagaaatggagtggattggggtggagtgcagtggaatggaatggaatgtgtagaaacggaatgtggt

SEQ ID NO: 7240 - DNA, 160 bp, Protomyxzoa rheumatica
tctaagaaactgctttgtgatgtctgaattcaactcagagagttgaacacttcttgagaaatagcagtttggaaacaaactttttctagaatctgcaagtattcatttggagcactttgaggcctgtagtggaaaaggaaacatcttcacacaaaaagtt

SEQ ID NO: 7241 - DNA, 126 bp, Protomyxzoa rheumatica
atgtttttccagtataaggctgttttatctgtattgtaaatctgttgtttactataaccatcttcatcagttatcttagttaaatctttcggataatttgctgcagcttctccatcagcacttgct

SEQ ID NO: 7242 - DNA, 134 bp, Protomyxzoa rheumatica
ttcccggttcagcctctgcccatgtgttccccgaggaggaacagcttagtcttggcaggtttggagcatctcaactgtgtttattaattatttattgttatttatttatttttgagacggagtctcattctctt

SEQ ID NO: 7243 - DNA, 159 bp, Protomyxzoa rheumatica
gctctaggtattataaggtacttatcatcatctactgacatagacatttcagcacttcaagtgaactgtagaacttttctacaattatgtctcttacctctccacctttaaggtacatttattttaaatatttcctgtacacacattgaacacctcatt

SEQ ID NO: 7244 - DNA, 166 bp, Protomyxzoa rheumatica
tgtcttacaaaagtaaaagtgaatactcattacttgtgaaagaagttagttagcttgccttaggtagatagcaagagaagagtccctggaaagtccctggtcagtgcctcatccctgcataacatataaagaagcctggaaaaaatcaagctgcagacactaacaa

SEQ ID NO: 7245 - DNA, 123 bp, Protomyxzoa rheumatica
ggacatgtggagcgctttgaggccaatggtggaaaaggaatatcttcacataaaaactactcagaagcattctgtcaaacttatttgtgatgtgtgcattcatatcacagtgttgaaccttac

SEQ ID NO: 7246 - DNA, 185 bp, Protomyxzoa rheumatica
gaatggactcgaatggaatcaccatcaaaaggagtcgaatggaatcatcgaaaggacttgaatcgaatcataaaatggactcaaacggaatcattagagaatggaatcaaatagagtaatcggatggacttgaatggaatcatcattgagtggaattgataggaatcattgaatgcactcgaatg

SEQ ID NO: 7247 - DNA, 176 bp, Protomyxzoa rheumatica
tcctttccattccattatattcgggtccagtacattccattcctttcgagtactttccattgcattccatttcctttgagtccactccattcccttccattccacttgagttgattcaattccattccattctattctagttcattccattgcattcaagtccattccattccatt

SEQ ID NO: 7248 - DNA, 193 bp, Protomyxzoa rheumatica
ataaaactagacagaagaattctcagaaactattttgtgatgtgcgcgttgaactcacagagtttaaactttgtatttgtagagcagttttcaaacgctctttttgaagaatttgcaagtctatatttacagtgctttgaggtctattgtagaaaagggaatatcgtcacataaaaactagaagaagcattct

SEQ ID NO: 7249 - DNA, 133 bp, Protomyxzoa rheumatica
actcctgctgtggtctgaatgtttgtccctcacataggataacacaacactcctgctgtggtctgaatgcttgcccctcacataggattccagaacactgctgttgggatctcagtgttggtccctcacatag

SEQ ID NO: 7250 - DNA, 124 bp, Protomyxzoa rheumatica
aatttcattcgattccattcgaagattccattcgtttccatttgatgttgattccattcctgtccaaccgattattccattcgattccattcgatgatgatttcatttgagtccattcaatgat

SEQ ID NO: 7251 - DNA, 126 bp, Protomyxzoa rheumatica
gtacaatataaaatatatagtttggttactttgatattttatttacagttcacaataaatgtttgtgtactttgaaattttatgtaaagtatagagtatatatttggtgtactttgatattttatg

SEQ ID NO: 7252 - DNA, 146 bp, Protomyxzoa rheumatica
gattccattcgatgatgattccattcaagtcctttaaatgatttccttccattccgtttgatgctgattaagtttgggtccactcaacgatgattccattcgattcctttcaattacaataatattcgattccattcgaggatgat

SEQ ID NO: 7253 - DNA, 125 bp, Protomyxzoa rheumatica
taggaaatatcttcccctaaaaactagactgaagaattctgagaaacttgtttgttatgtatgtgctgaaataacagacttggacctttgttttgatagggcagttctgaaacactctttttgtt

SEQ ID NO: 7254 - DNA, 122 bp, Protomyxzoa rheumatica
cgatgctgattcctttcaattccattcgatgattccatttgatttcatttgaagattccattcaaatacattcgacgatgattccatttgattccattcgatgattcaatttgattctattc

SEQ ID NO: 7255 - DNA, 144 bp, Protomyxzoa rheumatica
gcctaggaacctgtctgcctcctgtcatcaacatactgtccatggtgctcaggctgttcatgccaaggggtgcctgctggctcttgcggagctgccctcaaccctcctcccctccccccgcactcgtcagagctcaaagtccag

SEQ ID NO: 7256 - DNA, 125 bp, Protomyxzoa rheumatica
tgattgagcagttttgaaacttctacttttgtagaatctgcaagtgaatatttggagatccttgcggcctatggtggaaaagaaaatatcttccaataaaaactacacagaagcgttctgagaaa

SEQ ID NO: 7257 - DNA, 135 bp, Protomyxzoa rheumatica
aaagagctccaaaaatccagaagcagattctacaaaagtagtgttgcagtactgctctatcaaaagaaatgttcagctctttgagttgaatggacacatcccaaacaagttcctgagaatgcttctgtctagttt

SEQ ID NO: 7258 - DNA, 148 bp, Protomyxzoa rheumatica
aagattgctgacctgcaggcatggcttaacacttgtcttgcactgccttaaattgtgacaataatttggtattatattgccacagagtcagttttgtcagtcttatgatctctattttaacattagtgctgatgatttgttgtaccta

SEQ ID NO: 7259 - DNA, 152 bp, Protomyxzoa rheumatica
tctcggtgatcagtgcagtgatatgttaaaatgcccctgtaggctaggcaagagttacatcaccagggttatcagtgcagagatatctacaatacgccctgtaagcagagcctagacaagtgttacatcagctgggtgatcagtgcagagat

SEQ ID NO: 7260 - DNA, 128 bp, Protomyxzoa rheumatica
aatatctttaaatattttacagaatttgagggttttcatcaggacatttctctttcatctctctgcccattcctccagaattctgaaactcttataaaatgttcttattttcatgacaatatagttat

SEQ ID NO: 7261 - DNA, 205 bp, Protomyxzoa rheumatica
atgtctccagaaaaaaaactagagaaaagctatctgtgaaactgctttgtgatgtgtagattcatctcacagagataaacctttcttttgatccaaaacgttagaaactatttggaaagtctgtaaaaggacatttgggagcccatttaagaatgcacacatcacaaagcagtttctcagaaagcttctttctagtttttatctg

SEQ ID NO: 7262 - DNA, 146 bp, Protomyxzoa rheumatica
tagatgattccattcaattccattcaatgatgatgctattcgcgtcctttagatgattcctttcaattacaatcgatgatgattccattctattcaatccaatcatgattccattcctgtccattagatgattccatttgaatcca

SEQ ID NO: 7263 - DNA, 140 bp, Protomyxzoa rheumatica
aacagagttgaatctgtcttttgaaacaacagtattgaaacacagcttttgtaggatatgcgcgtggatatttggaactctttgaggaattggttggcaaagggtatcttcacataaaagtagacccaagcattctcaga

SEQ ID NO: 7264 - DNA, 174 bp, Protomyxzoa rheumatica
tttggtgagcattaccggattatgaaacaaatgaaaatgttgcaagtgaatattagtggatatacatgagatattattttgagatattttactttatgtttaaaatatattctcttagcaaaatttcttgcatgaataacagaataacatgtgtctgaatatcatagaatttca

SEQ ID NO: 7265 - DNA, 154 bp, Protomyxzoa rheumatica
ttaggtgatcagagtagagatatgtgaaaattcccatgtagacagaccctagacaagtgttacatcacctggtggtcagtgcagggataagtcgtaaagcctcctgtagagagggtgtagacaagtgtttcatcactggggtgatcagtgcaga

SEQ ID NO: 7266 - DNA, 143 bp, Protomyxzoa rheumatica
agcaggaacaaggggagggggaagtgccacacactttcaaacaaccagacctcacgagaattcactatcacaaagacagcaccaagtcctgagggatctgccatcatgacccaaacacctctcatcaggcccaccttcaacac

SEQ ID NO: 7267 - DNA, 125 bp, Protomyxzoa rheumatica
ggcatcaatgggctgagaagtatcccttcacagattctacaagaggactgtttccaagctgctcaattgaaagaaatgttcaactctttgtgatgaatgtgcatatcacaaataagtttctcaga

SEQ ID NO: 7268 - DNA, 129 bp, Protomyxzoa rheumatica
gaattgaatggacccaaatgtaatggacctaaatggaatggactcaaagagaatggactcgaaacgaatggtctcaaatggaattcattcaaatagaatcgaatcgaattgaatgaaatagtttgcaat

SEQ ID NO: 7269 - DNA, 145 bp, Protomyxzoa rheumatica
tcacatagaattccagaacactgcgacgagggtctgaatgtttgttcataacataggattccagaagactcccgctgttgtttgaatgtttgtccctcacatagtattccagaacactgctacgattgtctgaatgtttgtccct

SEQ ID NO: 7270 - DNA, 126 bp, Protomyxzoa rheumatica
acacatatctttaataaagtaaaatgtccaggccccctctgctcccacctgtctccctctcccacctctctccccgctcccctccccagaggacatggctgacaagcctttgaggggtttcccctt

SEQ ID NO: 7271 - DNA, 135 bp, Protomyxzoa rheumatica
tagtcaggaaaacagtagagcccattgaaggctgggcgatggttgtcagtgtggtggtagggatgtctgcagtcagagaagatggggtcatggttgtggaagtcactatgggacctgaggtagtgggaactgagg

SEQ ID NO: 7272 - DNA, 187 bp, Protomyxzoa rheumatica
acaaaaagagtgtttcaaagctgatcaattaaaagaaaggttcaattcagtgtgatatgaacacacacatcacaaagaagtttctcataatacttctgtctagttattatatgaagatatttggttatccaccataggcttcaaatccctctaaatgtccacttgcatattctacaaaaagagtgtt

SEQ ID NO: 7273 - DNA, 191 bp, Protomyxzoa rheumatica
cattcagaccatcgtagcagtgttctggaattctgtgtgagagacaaacattcagaccctcgtagcggtgttctggaatccaatgtgacggacaaaaattcagaccaccacaggagtgttctggaatcctctgtgagggagaaacattcagaacctagtagcagtgttctggaatcctatgtgaggaataa

SEQ ID NO: 7274 - DNA, 138 bp, Protomyxzoa rheumatica
gaatggaatcaaatgatatcatgcaatgcactcgaatggaatcatcgaatggactccaatggaatcaacattgagtggaatcgaaaggaaacatcgaatggaattgagtctaatcatcgaatggaataatcatcgaat

SEQ ID NO: 7275 - DNA, 125 bp, Protomyxzoa rheumatica
tagcaagacaccatctctacaacacattttctaagatagaaattatttttagaaagatataatgcctaagggctcagggaagcaatacctttatgactgtatggtaagcatcaggcaaggctgct

SEQ ID NO: 7276 - DNA, 122 bp, Protomyxzoa rheumatica
tctccaggaatcccgtgggaactggaagaggctctcagggctcccaagcgtcttcagcagggaaaaaccggcctgggacggtggaggggagtgtagaactgaacctccgaggaagtcttgag

SEQ ID NO: 7277 - DNA, 128 bp, Protomyxzoa rheumatica
agaccacagcagtagggttctggaatcctatggaagggataaacattcagaacctcgtagcagtgctctggaatgttacgtgagggacaaacattcagaccgccttagcagtgctctggaatcctatt

SEQ ID NO: 7278 - DNA, 161 bp, Protomyxzoa rheumatica
gcagatatatgtcaaaatgcccctgtaggcagagcctacaaaagtgttagagcactaaggtgatcagtgcagagatatgtcaaaataccccctgtaagcagagcctagaaaagagtcccatcacctgcgtgatcagtgcagagatatttcacaatgcgccc

SEQ ID NO: 7279 - DNA, 192 bp, Protomyxzoa rheumatica
ggtgcactaggagctgggaggcaatagactgaatactgacactacagacgctggctcatggtaacgaagagaagctgaaaaggagtgggaaagaactaactgtaattttacatcaatgatctgcatctttgttttgacgttttgtggcaaccaaaatgactatcctttctaccctcctagttcagtcatagc

SEQ ID NO: 7280 - DNA, 130 bp, Protomyxzoa rheumatica
gactcgaatagaatcatcattgaatggaatcatacggactcctcgaatagaataaaatggaatcatcaaatggaatcaaatggtatcatcatcgaatggaattgaatggaatcatccaatggaatccaat

SEQ ID NO: 7281 - DNA, 186 bp, Protomyxzoa rheumatica
gaaactgtctgagaaactactttgtgatgcgtgctttcatctcacagatttggaccttcgttttcattgagcagtttggcaacaagtcattttgtagaatctgcaaagggatatttgtgagtggtttgaggccaatagtgaaaaagtaaatatcttcacctaaaacctagacagaagcattttgag

SEQ ID NO: 7282 - DNA, 142 bp, Protomyxzoa rheumatica
ctcttgtccaggctctgcctatagggggccttgtgacatatctctgcactgatcatctaggttatggacctcttccttacgctttgcctgcaccgcagggatattgtgaaatatctctgcactgatcacccaggtgatggga

SEQ ID NO: 7283 - DNA, 135 bp, Protomyxzoa rheumatica
aagcagtttcacagagaacttatttacagtttttaatctggggatattttctttttctccataggctggaatgggctcccaaaggtcttttcccagattcaccaaaaagagcgtttccaacctgctgaaataaaa

SEQ ID NO: 7284 - DNA, 170 bp, Protomyxzoa rheumatica
ttctctgaaactactttgtgatgtgtgcattcgggttacagagtttaaccgttcttttgatagagcagttttaatacactacactcattttgtgggatttgttagagtatatttagagctctttgaggccgacggaagaaaaggaactatcttcacataaaatctagaca

SEQ ID NO: 7285 - DNA, 132 bp, Protomyxzoa rheumatica
cgagtggcatcgaatggaattgaaaggaattcggtgaagtgcagtggagtgccgtggaatggagtgtaatggaatgggttagaatggaattgagtagacgggaatggagtgtagtggaatggagtggaatgg

SEQ ID NO: 7286 - DNA, 141 bp, Protomyxzoa rheumatica
ggagtcgaatggaatcatcatagaatggaatctaatggaatcatcaacgaagggaatcaaatggaatcatcatagaatggatacaaatggaatcaacaacgaatggaatcgaatcgaatcattgaatggaatccaatggaa

SEQ ID NO: 7287 - DNA, 139 bp, Protomyxzoa rheumatica
gaacatttccaacccacacttgtcccttgacctccagaaactgatatccaactgtcttctggacaactgactttgaatatcctgcagtttcctccaacctaagatgtacaaaaattaacttatcactttctccctaagc

SEQ ID NO: 7288 - DNA, 151 bp, Protomyxzoa rheumatica
ctgagaatgattctgactagtgtttatgtgaagatatttcttttcccatcataagcctcaaatcactcaaaatatacacttgcagatagtacaaaaagactgtttcaaatcttctctctcaaaaggaaggttcaactctgtgagttgaatg

SEQ ID NO: 7289 - DNA, 124 bp, Protomyxzoa rheumatica
ctttcctaagcctcaattagtaaacacatctggcctaatcacattgaccaacctctctcctaacatgcagtagatttcactagctcatgcaaaattatcctgccttttgcttcaatgagttgaa

SEQ ID NO: 7290 - DNA, 233 bp, Protomyxzoa rheumatica
cccctccacttcataccattagattccatcccattccatttcactccactccactccattctactccactccactccattctactccactctactccactctgctctgctccactccattatattccactctattccattccattctttacattcaacaggatctcactctgtcacccagtctggagtgcagaggcagaatctcagctcacatttcatttcactattccattc

SEQ ID NO: 7291 - DNA, 146 bp, Protomyxzoa rheumatica
ggaaataccctaggataaaaactaggtggaaactatctgaaaaactggtttgtgatatgtgcattgctctggctgagaaaaacttttcttttgattcagcagtttggaaactctgtatttgtagaatctgcaaaaggacatttggg

SEQ ID NO: 7292 - DNA, 140 bp, Protomyxzoa rheumatica
gaactagaaggcaacataggattttgtgtagtagtacacgtggattactttgttttgtaaatttgattacacattacataacaaatctatgttcacataagcttattcttcttggttcccgttttggacggccagggacc

SEQ ID NO: 7293 - DNA, 173 bp, Protomyxzoa rheumatica
tgtatttttttgaaaaggagccttcaccgagattctttaaaaattcttgctctgtcctacagtaggaaccgatagactcatggatatggtcctctaatggatcggtaccacctcagctctctgattgttgccctcctgtggtgaaaattaaagtttattttcatttcatgtct

SEQ ID NO: 7294 - DNA, 134 bp, Protomyxzoa rheumatica
ctttgcagactctacaaaaagactacttccaaactgctcactaaaaagaaagtttcacctctttgagatgaatggacccatcaaaaagaagtttctcaaaaagcttctgtctagtttttatatgaagatatttc

SEQ ID NO: 7295 - DNA, 146 bp, Protomyxzoa rheumatica
ataggttcaactctgtaaattgaatgcacacatcacaaagaagtttccttgaatgcctctgtgtaacttttatttgaagatatttccttttccacaatacagtgcagagggctcaaaatatccacttgcacattctacaaaaagag

SEQ ID NO: 7296 - DNA, 123 bp, Protomyxzoa rheumatica
tgagcagttttgaatctctctttttgaagaatctacaagtgaatatttggagccctttacagcataaggtggaaaaggaattatcttcaagtaaaaactacacagaaggattctgagaaactt

SEQ ID NO: 7297 - DNA, 147 bp, Protomyxzoa rheumatica
ccagtagcagtgttctggaatcctgtgtgagggacaaacactgagaccccagcagcagtgttttggaatcctatgtgtgtgacaaatattcagacccttgtagcagtgttccggaatcttatgtgagggacagacactgagaatcta

SEQ ID NO: 7298 - DNA, 168 bp, Protomyxzoa rheumatica
cgagttgattcgatgattcaacgcgatttcattcgatgatgattacattccattctatttgatgattccattcgtttccatctgttgatgattcctttcgtgtccatttgatgattccattcaattctattcaatgatgattccattcgggtccatttgatgattcca

SEQ ID NO: 7299 - DNA, 137 bp, Protomyxzoa rheumatica
gcgttgaaacacccagtttgtagaatctgcaagtgttcatttggagcgattttttgtctatggtggaaaaagaaatatcttcatattaaaactagacagaagcattttcagaaacaactttgtggtctgtgtgttca

SEQ ID NO: 7300 - DNA, 163 bp, Protomyxzoa rheumatica
tgtccacttgcagattctacaaaaagagtatttcaaaacttgtacatcaaaaggaaggttcaactcctggagatgaatgcacacaacacaaagaagtttctctgaatacttcaatcttgtttttatgtgaagatatttccttttccaccattggcctcaaagc

SEQ ID NO: 7301 - DNA, 204 bp, Protomyxzoa rheumatica
actggaatgatatggactggaatagaatggactcgaatgtcatggattgcaatataattgatttgaatggaaaggaatcgaatggaacgtaagcaaatggaatggaatggaatgaaatggaatggagtggaatggaatgcaatggaatggaatggaataaaatggaatgaagtggaatggaatgcaatggaatggagtggaatg

SEQ ID NO: 7302 - DNA, 130 bp, Protomyxzoa rheumatica
aggtgtgacattatactgatgacatcattctcagagaaaattcattttacacactgaagatacacagacacaaagagccttatacaaagggaatggacctttccccaacacagtagtgcaaggccctgcc

SEQ ID NO: 7303 - DNA, 150 bp, Protomyxzoa rheumatica
cacatcacaaagcagtttctcaaaaagcttttttctagtttttatccaaaaatgtttcctttttaaccataggcttctatgtgctcccaattatccattcacagattgtacaaaaacagtgtttccaaaatgccccatcaaaagaaatgt

SEQ ID NO: 7304 - DNA, 125 bp, Protomyxzoa rheumatica
cacaccacccaaataagtttcttataattcttctgtcaagttttatgaagaaatcccgtttccaacgaaggcctcaaaaaagtggaaatattgacatgcagattctacaaaaagagtgtttcaaa

SEQ ID NO: 7305 - DNA, 131 bp, Protomyxzoa rheumatica
cttcttgtggacctccaccttggaggaggtggcaaacgcttagtagtcttccaggagtcaacatgtgggcactcacgctgatctccatatcattgtggagagtcaatgtcaaggcccctctgcccttcaaa

SEQ ID NO: 7306 - DNA, 155 bp, Protomyxzoa rheumatica
ctccattccattccattcgtgtccattccattccattcgagtccattccatcccattcgtttctagtacattccttcccaatacattttattccattccatccttttcattacatactattgcattccattcctatgaattctattcccttccat

SEQ ID NO: 7307 - DNA, 140 bp, Protomyxzoa rheumatica
tgcattcatctcacagagttgaacctttcttttgattgagaagtttgcaaacactcttttggagaatctgcaagtggaaaatttgtacgctttgcagtcaatggtagaaacggaataatcttcaattaaaatctacacag

SEQ ID NO: 7308 - DNA, 123 bp, Protomyxzoa rheumatica
ccgcccgtgaccctgaagcctcccagctaccaccatggagcgcctggtggcagaactcagacatctagctctctttgccgacctcctggctagatctacgctcattgcgcaccccggctgaca

SEQ ID NO: 7309 - DNA, 147 bp, Protomyxzoa rheumatica
aaaatttcgtcagttttgatgtttttcagagaacaaactaggttgtgttgatttttgatattgtttttctattctctatttcacttatttccactgctatctttatcttttttttaaaagtttgctagcttttagttttccctcttt

SEQ ID NO: 7310 - DNA, 210 bp, Protomyxzoa rheumatica
ggtatggaatggaatggaaaggaatggaatggaatggaataaaagggcatggaatgaaaccgaatcaacccgaatgtaatggaacggaacggagtgcaatggtatggaatggaatggaatggaaaggaatcaacctgaagggtatggaacggaattgaatggcatggaatggaatcaacccgagtggaatgcaaaggaaggaaatttaat

SEQ ID NO: 7311 - DNA, 126 bp, Protomyxzoa rheumatica
cattcaactcactgagttgaacactccctttcaaagaacagttttgaaacactcttttcatagaatctgtcagtggaaacttggagtactttgaggcctgcactgaaaaaggaaatatcttcccat

SEQ ID NO: 7312 - DNA, 257 bp, Protomyxzoa rheumatica
ttctttgtgatgtgtgcattcatctcatagtgttgaacccttcttttgcttgagcagttttgaaacacactttataaaatctgcaagtggatatttgaagcactttgaggcctattgtggaaaagtaacatcttcacataaaaattgcacagaagcattatgagaatcttctttgtgatgtgtgcattcatatcacagatgtgaacctttcttttggtagagcagttttgaaacacggtttttgtaaaatctgcaag

SEQ ID NO: 7313 - DNA, 141 bp, Protomyxzoa rheumatica
attcaattcaagtccattcaatgattattccttttgattctatttgatgattcaaatcgattccatttgatgattcacttcaattccttttgatgatgattgcattcaattccattcgctgattccattcaattcctttct

SEQ ID NO: 7314 - DNA, 145 bp, Protomyxzoa rheumatica
gaatcatcatcgaatggaatcatgtggaatcgtcgaatgaactcaaaatgaatcataatcgaatggcatcgaaaggaatcatcatcgaatggaatcacatggaatcatcttggaatggaatcatacggagtcatcatagaatgga

SEQ ID NO: 7315 - DNA, 122 bp, Protomyxzoa rheumatica
gaatggaatataatggaattgagtggaatggcatggaatgaaatggaagggaatggaatgcaatagaaaggagtctaatcaacacgagtggaatcggatggaatggaatggaatgcaatgga

SEQ ID NO: 7316 - DNA, 136 bp, Protomyxzoa rheumatica
gaaacttctttgtgatgtgtgcattcaactcagagagttgaacttttccttttacagagtagtttttaaaaactctttttgtagaatctggatgtgcaaatttggaaatcattaaggcgtatggtgtaaaaggaca

SEQ ID NO: 7317 - DNA, 124 bp, Protomyxzoa rheumatica
atgtgtgcattcaactcacagcgtggaaccttcctgttgatagagctgttttgaaacggtctctttgtaggatctgcaagtagatatttggagcgatttcaagcctgtggtggaaaaggaaaca

SEQ ID NO: 7318 - DNA, 141 bp, Protomyxzoa rheumatica
atgaagctttgttgacttttactgaaagccttttctgcatctgttgagacaatcacctggttcttatctttagttctatttatgttacgtatcgcattttattgatttgcccatgatggaccaacttttcattccagggaa

SEQ ID NO: 7319 - DNA, 128 bp, Protomyxzoa rheumatica
agactggttcagaactgctcagtcaaaaaaaaaaggttcaactctgtgatctgaatgcacacatcacaaagatgtttgtccgaatgcttctgtctagttcttatgtgaagatatttccatttccaaca

SEQ ID NO: 7320 - DNA, 140 bp, Protomyxzoa rheumatica
tcatctcacagagttgaaagtatcttttgatttaacagtttggaaacactgttttttttagtatctgcaagtggatatttgcagtgcttttctgcctatggtacaaaaggaaatagcttcacttaaaatctagaaagaag

SEQ ID NO: 7321 - DNA, 136 bp, Protomyxzoa rheumatica
ttctacaataagtgtgtttcaaaactcctctgtaaaaagataggttaatctctgtgagttgaatgcacgcatcacaaagtagttttggagaatgtttctgtctagtatttaggtgaagatattcccgtttccaacg

SEQ ID NO: 7322 - DNA, 123 bp, Protomyxzoa rheumatica
gaaaggaatgggtttgaatggaatttatttgaataaaattgtttcgtatggaatgcaatagtacagaatggaatagaatgaagtggacatgaacggaatggactggaatagaacagactcgaa

SEQ ID NO: 7323 - DNA, 128 bp, Protomyxzoa rheumatica
cgtgggaacgcgaagccgaggcacatctacgcagctcgcgcccatggaggtctcggcgtgtcagaagaagatgtaagcaatccaggcaccctcccaaccgctccaggagctggagtcttcatctgtac

SEQ ID NO: 7324 - DNA, 143 bp, Protomyxzoa rheumatica
actctgtcactcagattggagtgcagtggtacaatcttagcacacatttcatttcacctttccattccattgcactccactccactgcattgcaatccattcaactccactcctttccattccattccattccgtcccattcc

SEQ ID NO: 7325 - DNA, 150 bp, Protomyxzoa rheumatica
ttccattcaattcgagaccgttctattcctgtccattccttgtgactcgattccatttcactctactccattccattccattcaattccatttgactctatatccgttccattcaattccattccattcgattccagtcttttcaagaac

SEQ ID NO: 7326 - DNA, 133 bp, Protomyxzoa rheumatica
tctctactaaaaatacaaaaatgagccaggcatgatgccgggcgcctgtaatcccagctaaaaaaagacaaaaaatttttccaaatatggtatttttattaaatcttattgagtagttttcacattggcaact

SEQ ID NO: 7327 - DNA, 132 bp, Protomyxzoa rheumatica
tcacaaatcagtttctcagaaagtttccttctagtttttaatctgaagatgtttcttatttcaccttaggcctcactgctctccgaactaaccctttccagattcaatgaaaacagtgtttccaaactgctg

SEQ ID NO: 7328 - DNA, 157 bp, Protomyxzoa rheumatica
tgtttcctaactgctcaatcaaaatattggttcaaaactgtgagatacatgctgacatcacaaagaagtttctcagaaagattctgtctagtttttacctgaatatatttactttctcaccttaggcctcaaaccactcacaaatatccctttgcgg

SEQ ID NO: 7329 - DNA, 134 bp, Protomyxzoa rheumatica
atttcgttagattacatttgattccattatatactattgcagtctattcgattccattctattagaataaattcctttcgagaccattcctttcgagtccattctatttgagtccattccattcgagtccatta

SEQ ID NO: 7330 - DNA, 147 bp, Protomyxzoa rheumatica
ggaatcgaaaggaatcattgaatggactcgaatagatacatcattgaatgaaatcgaatttaatcattgaaaggaatcaaatggaatcatcatctaatggaatcatctaaaggactggaatggaatcatcttcaaatggaattgaat

SEQ ID NO: 7331 - DNA, 123 bp, Protomyxzoa rheumatica
aaaccctggagaatagttccatctcctggatgatcagttcagaaatatgtgacaatgacccctctctgcggagcctaaagaagatttgcaccatttgggtgatcagtgcagagatatatcaca

SEQ ID NO: 7332 - DNA, 161 bp, Protomyxzoa rheumatica
acctatgttgaaaaaaggaaatatcttcacataaaacttagacagaagctttctgagaagcgtcgttgtgatgtgggctttcatctcaccgagttgaagctttcttttgattgatcagtttggaaacaatctttttgtggaatctgcaagtgtacatttgt

SEQ ID NO: 7333 - DNA, 140 bp, Protomyxzoa rheumatica
ttcttttgatagagcagtttgaaacactgcttttgtggaatctgttgtgtatatttggagctctttgaggaatacattgtaaatgggatatcttcacatacaaactatacaaagctttctcagaaactgctttgtgacgt

SEQ ID NO: 7334 - DNA, 128 bp, Protomyxzoa rheumatica
ttagttgaacgcacacatcacaaagtagtttcggcgaaagattctgtctagtttttatacaaaggtattgccttttctaccattgcctcaaagcacttgaagtctctacttgcaaattccataaaaag

SEQ ID NO: 7335 - DNA, 131 bp, Protomyxzoa rheumatica
tgaatgtttgtccctcacataggactccagaacactccaactgtggtctgaatgtttgtctctgagatagcattcaagaacactgctgctggagtctgagcgtttgaccctcacataatattccagaacac

SEQ ID NO: 7336 - DNA, 151 bp, Protomyxzoa rheumatica
ggaatcatggaatggaatcaaatggaaacattgcatggaatcaaacggaatcatcaaatggaataatcgaatggaaccgaatgcagtcatcctcgaatggagtattcaaatggaactgaatgcagttatcttctaatggaatcgaatggaa

SEQ ID NO: 7337 - DNA, 122 bp, Protomyxzoa rheumatica
agtccattacatttgggtccattccattccattccattcccatccatggcatttgatgccatccattcgattctacttctttcgagtccattccattcaagtccattccatttcattgtact

SEQ ID NO: 7338 - DNA, 144 bp, Protomyxzoa rheumatica
aatgcacacatcaaaaagtagtttctgagaatgattctgtctagttcttctatgaagacatttccttttctaccacaggcctcgaaccgctctaattatccacttggaaagtctacaataagagtatttcaaaactgctctatc

SEQ ID NO: 7339 - DNA, 150 bp, Protomyxzoa rheumatica
aaactttctatctagtttttatgtgaacatatttcttatctccccatagacctcaatcagctcacaagtatccttctgcagagtgtaaaaaactactgtttccaaaccgttcaatcacaggaaaggtttaactctgtgaaatgaatgcat

SEQ ID NO: 7340 - DNA, 203 bp, Protomyxzoa rheumatica
tggaatggagtggagtggaatggaatgggatgggatggaatggagttgagtggattggattcaaattgaatggagtggagtggagaggagtgtagtggaatggaatggaatagaatggtgaaatgaaatgtgagctgagattgtgcactgcactccagcctgggtgaccttgtgagatcctgtcaaaagaaaggaatggaatt

SEQ ID NO: 7341 - DNA, 578 bp, Protomyxzoa rheumatica
atctttccgtagaatcttgaagtgaatatttggagggcttggagttctgttttagagaagaagatatcttcatcaaaaactacacagaagctttccgagaaacttctttgtgatgtgtgcattcaactatcggagttgaacctatcttatgattgaggagtttggaaacactctttgtagagtctgcaagtggatatttacagagatttgaggcctattgtggaaaaggaagtatcttcacataaaaaccacacagaagcactctgaaaaacatctttgggatgtgtgcattcaactaaccgtgttgaaacaatgttttgattgagcagcttagaatctctctttttgtaggaaatgcaagtggatatttggagccccatttcgccctatggtggaaaacgaaacatactcacaaaaaagctgcagagaagcattctgagaaacttctttgcgatgttggcattcaactcacagagtcgaatctatcttttgatagagcagttttgtatctctctttttgcagaatctgcaagtggatatttggaaagctttgaggcctattgtggaaagggaaatat

SEQ ID NO: 7342 - DNA, 90 bp, Protomyxzoa rheumatica
ttctgtgtagtttttatatgaagatatctccttctccaaagcaggtctcaaagccctccaaatattcacttcaagattctacggaaagat

SEQ ID NO: 7343 - DNA, 170 bp, Protomyxzoa rheumatica
ctggaatcctatgtgagggacaaacattcaaacaacagcgagagtgttctggaatcctaagttatggacaaacactcagaccctcgtggcagtgttctggaattctatgtgatggagaaacactcagaatccagcagcagtgttctggaatcctatatgacggagataca

SEQ ID NO: 7344 - DNA, 138 bp, Protomyxzoa rheumatica
ccattccattccactcgagataccattccattcctttgcattccactagagatgattccattccattctattgcattcgaagccacttcattccattccattccattccaatctcttcaggtccattcaattcaaatg

SEQ ID NO: 7345 - DNA, 174 bp, Protomyxzoa rheumatica
cacacatcacaaagcagtttctgagaatgcttctgtctagcttgtatgtgaagatagttccttttccctcataggtcccaaatcgttccaaatatcgacttgcagataccacaaaaagactgcttcaaaactgttctcagaaggaaggttcaactccgtgtgttgaatgcacac

SEQ ID NO: 7346 - DNA, 288 bp, Protomyxzoa rheumatica
tcaaatgtaggcctcaaatcgctccaaatatccacttgcatattgtacaaaaagagagattcaaaactggtcactcaaaagttaggtccagctctgtgagctgaatgcacacatcacaaagatgtttctcagaaggtttctgtatagtttctatatgaagatattggcttttccacaatatgcctcaaatctccccaattatccacttgcagattctagaaaaagagtgtttcaaaacagctcaatcaaaataaactttcaactctgtgagatcaatgcacacatcac

SEQ ID NO: 7347 - DNA, 216 bp, Protomyxzoa rheumatica
gaatgcaatggaatggaatgcaatggaatgcagtgaagtggagtggagttcacaggagtggaatgcaatcgatgggatggaattgaatgtaatggaatgcaatgtaatggaatgcaatggaatgcaattgtgaaattaaatgtgagctaagatagtgtcgctgcactccagccggtgtgacagagtgagatcctgtcgaaagaaatgaatggaatg

SEQ ID NO: 7348 - DNA, 149 bp, Protomyxzoa rheumatica
actgcattccagttgattccattccattccattccattctttctattccattcaattctattcgagtccagttgattcaatttcattctattcctctccattctataccatttcattccattccactaggcttgattcaattctgttcc

SEQ ID NO: 7349 - DNA, 148 bp, Protomyxzoa rheumatica
acatatctatgcactgatctctgagatgatgcaactcttgactaggcactgcctacaggggacattggtacatctcactgcactgatcacccaggtgatggactcttgtcttagatgtgcctacatggtcattgtgacacatcattga

SEQ ID NO: 7350 - DNA, 327 bp, Protomyxzoa rheumatica
tgtttcaaacctgctctgtgaaagggagtgttcaattctgtgacttgaatgcaaacatcacaaagtagtttctgacaatgctgctgtctgctttttatacgtattcccgtttccaacgaaatcctccaagctggcctaatacccacttgcatattccacaaagactgtgtcaaaactgctctctcaaaagaaaggttcaactctgtttgctgagtagatacatcatgaaaaaagttctgacattgcttctatctagtttttattggaagatatctcctttttcaccgtagacctgaaagcgctccaaatgtccacttccagatagta

SEQ ID NO: 7351 - DNA, 149 bp, Protomyxzoa rheumatica
attctcagtaactactttgtgatgtgtgtactcaactcacggagttgaacttttcttttgaaagagaagttttgaaacaccctttttgtagaatctgcaaatgggtatgtagcctgctttgaggccttcattggaaacgggaatatctt

SEQ ID NO: 7352 - DNA, 165 bp, Protomyxzoa rheumatica
ctattcggattaattccattccattccattccattccattttattccattccattcctttccactccactctattcctttccattccttacattcgacaggatctcactctgtcaccgagtctggagtgcagtggcagaatctcagctcacatttcatttcacta

SEQ ID NO: 7353 - DNA, 185 bp, Protomyxzoa rheumatica
ttagtgatgtgtgcattcatcccacagatttaaacttttcttttgatggagcagttttgaaaatctatttttgtaatatctgcaagtggacattttgagtgatttgaggcctatggtggaaaaggaaataccttcacataaaaggtagacagaagaattccgagataattctttgtgatatgtga

SEQ ID NO: 7354 - DNA, 141 bp, Protomyxzoa rheumatica
tccatccgtgaaattccagctgaggctctcgcaacaccttccgaagctctttagtcaaagcctggagaatagttaaatctcctggatgatcagtacagaaatatgtcacaatgcctcctccgtgcggagcctagagaaggt

SEQ ID NO: 7355 - DNA, 381 bp, Protomyxzoa rheumatica
ttcctctgtctagcattatatgaagaaatcccttttccaaagaaggcctcatagaggtccgaatatccacttgcagtctttacaaacagagtgtttcctaagtgctctatgaaaagaaaggtagaactctttgaattgaacgcatacatcacaaagcagtttctgagaatcattctgtcaagtttttatacgaagaaatgtccttttctaccattgacctcaaagcgtctgaaatctccacttgcaaattccacaaaaagagtgtctcaaatctgctctacctaaaagaagggtcaactctgtcagttgaatacacacaacacaaagaagttactgagaaatcttctgtctagccttacatgaataaaacccgtttccaac

SEQ ID NO: 7356 - DNA, 272 bp, Protomyxzoa rheumatica
aatgcaatggaatgcaaaggaatggaatgcaatggaatgaaatggaatggaatgtaatggaatgaaatggaatggaattcaatggaatacaaaggaatggatggtgaaattaaatgagaactgagatcgtgccgctgcactccagccagggtgacacagtgagatcctgtcgaaagaaaggaaaggaatggaatggagtgaaatggaatggaatggaatcgaatggagtgtagtgaagtggagtggaaaggagtggaatggagtggaattga

SEQ ID NO: 7357 - DNA, 208 bp, Protomyxzoa rheumatica
accaaaggcctcaaagcactccaagtatccacttacagattctacaaaaagagtgtttaaatacttctcaaaaaagaaaggttcagctcagtgagatgaatgcatacatcacaaagaacattctcagaatgcttctgtctagcttttatgtgaagatatttcctttttcaccataggctgcaaagcgctccaaatatccctttcagat

SEQ ID NO: 7358 - DNA, 152 bp, Protomyxzoa rheumatica
ttgaggccttcgttggaaatgtgaatatcttcacatataagctagacagaagtattctccgaaacctctgtgtgatgagtacattcaactgacagagtggagcctttcttttgatagagcagttttgaaacacactttttgtggaatctgct

SEQ ID NO: 7359 - DNA, 157 bp, Protomyxzoa rheumatica
tggtgtactttcatattttatgtatggtatagaatagatattaggtgtactttgattttttatgtacagtatagaatatatatttggtgtattttcatattttatgtacagtatagtatatacagtttgtgtactttgatattttatgtacagtata

SEQ ID NO: 7360 - DNA, 145 bp, Protomyxzoa rheumatica
tgaaatctgcactagcaaattccacaaaaagagtgtttcacctctgatccctctaaagaaagattcaactctgtgagttgaaaacacacaacacatagaagttactgagaattcttctgtctagcgttatatgaagaaatcccgt

SEQ ID NO: 7361 - DNA, 524 bp, Protomyxzoa rheumatica
ggaaaggaatggaatggaatggaaaggagggaatggaatagaatggagtggggtggagtggaatggagttgaatggaatgggatgtaatgaaatggagtgtaatggactggactggagtggaatggagttgagtagagtggaagggactggaatggaatgggatggaatggaatggaatggagtggagtggagtggggtggaaaggaatgggatggagttgagtggagtggagtgaaatggagtagaatggaaaggaatggagtggagtggagttgaatggaatggaatggaatgaaattgaatgcaatggtgaaatgaaacgtgaggtgttattgtgctaccgcactccagccttggtgacagagtgagatcttcttgaaagaaaggaattgaatggaatggagtggaatggaatggaatggaatgcagtggatggagtggagtggaatagagtggaacggaatgtgatggagtagaatggcatggagtggagtggagtggaattgagtggaatggaaaggga

SEQ ID NO: 7362 - DNA, 249 bp, Protomyxzoa rheumatica
ttctgtgtagttttactttgaagatatttcattttccaaaacaggccccaaagctctccaaacatccacttggtgattctgcaaaaagagcgtttcagtactgctcaataaaaagaaaggttcagctctgtgtgaggaatgcattcatcacaagaagtttctctgaatgcttctttgtagtttttgtatgaagatagttccctttccaccacagggtgcaaagagctccaaatatccacttgcagattc

SEQ ID NO: 7363 - DNA, 227 bp, Protomyxzoa rheumatica
gaatcatcgcatagaatcgaatggaattaacattgaatggactcgaatggaatcaacatcaaacggaatcaagcgtaattatcgaacggaatcgaagagaatcatcgaatggactcgaatggaatcatctaatggaatggaatggaataatccacggactcgaatgcaatcatcatcgtaaagaagagaatggaatcatcgaatggactcgaatggaataatgattg

SEQ ID NO: 7364 - DNA, 258 bp, Protomyxzoa rheumatica
tgtggccttcgtttgagacgtgacttcttcatacaaaactggacagaagaattctcataaacttcttcgtgatgtgtgctttcaactggcagcgttgaagcttcctttcgatagagcagttttctaactctctttttgtagaatttcccggtggatatttagcgccttttgaggcccatggtggaaaaggcaatatcttcatagaaaaactagaccgaatcattctcagaaactactttgtgatgtgtgccttcaact

SEQ ID NO: 7365 - DNA, 208 bp, Protomyxzoa rheumatica
aaggaaggttcaactctgtgagttgaatgcacacatcacaacgcagtgtctgagaacgcttctgtctagtttgcatgtgaagatatttccttttccatcttaggcctcaaatcgatccaaatatccaattgcagataccacaaaaagactgcttcaaaacagctctcgcaaaaggaaggttcaactctgtgagttgaatgcacacatc

SEQ ID NO: 7366 - DNA, 142 bp, Protomyxzoa rheumatica
aaagcactccaaatgaacacttgcagattctacaaaaagactgtttcaaatctgctccatcaaaggaaggattcaactctgtgagttgaatgcacacaccacaaagcagtttctgagaatgcttctgtctatgtttttgtga

SEQ ID NO: 7367 - DNA, 171 bp, Protomyxzoa rheumatica
tcagaaacttctttgtgataagtgcattcaactcacagagataaacctttctgttgatagagcagttttaaaacactctttttctggattgggaaagtggatatttggagcgctttgaggcctatagtggaaaaggaaacaacttcacaaaataactagagaagaagcatt

SEQ ID NO: 7368 - DNA, 141 bp, Protomyxzoa rheumatica
tctatttttcaggtgaagatatcactttttccaacatacgcacaaaagaactcgaaatggacacttgcagattctacaaaaagtatgtttcaacactgctctatcaaaagaaaggttcaacgatgtgaattgaacacacac

SEQ ID NO: 7369 - DNA, 149 bp, Protomyxzoa rheumatica
gtatctgactgtgtatatttggaactctttgagttattcgttggaaacgggtatcttcacataaaaagtagacccaagcattctcagaaggttctttgtgatgtgtgcgttcaactcacagacttgaaactttcttttgatagagcagt

SEQ ID NO: 7370 - DNA, 165 bp, Protomyxzoa rheumatica
gtgacatacctttgcactgatcacccaggtgacgtaactcatgtaagttctgcctacaggagctttttgacatatctctgtactgatcacttaggtgttgtgacacttttataatcactgcctacagggaattttgacaaacctctgcatcacctaggtgatgta

SEQ ID NO: 7371 - DNA, 182 bp, Protomyxzoa rheumatica
tctacaaaaagagagtttcaaagctgctcaatgaaaagaaagtttctactctctgagatgaatgcacacatcacaaaaaagtttgtcagaatgcatctgtctagtttttatgtaaagatacttccttttccaccacagcccccaaagcgctccaaatatccacttgcagattctacagaaag

SEQ ID NO: 7372 - DNA, 129 bp, Protomyxzoa rheumatica
caaatgtcacttcacagattctacaaaaacagtgtttcaaaactactgaatcaaaagaaatgtttaactttgtgagttgaatccacacatcaaaaagcagtttcacaaataactttgttctagctttta

SEQ ID NO: 7373 - DNA, 147 bp, Protomyxzoa rheumatica
aaaactacacagaatcattctgagaaacttctttgtgatgagtgcgttcatctcacagatttcaacataccttctgattgagcagttttgaatctctctttctgtaaaatctgcaagtggatattttgagccctttgtggcctatgg

SEQ ID NO: 7374 - DNA, 139 bp, Protomyxzoa rheumatica
ggaatggaatggaatggaatcaacacgagtggaatggaatagtctggtatggaatcaacccgagtggaatggtatggaatggaatggagtaaaatggattggaatggaatcaacccgagtgcaatggaatggaatggaa

SEQ ID NO: 7375 - DNA, 164 bp, Protomyxzoa rheumatica
caaatgaaatcgaacggaatcatcatccaatggaatctaatggaatcatcgaacggaatcgaagcaatcatcatcgagtggaatcaaagggaatcatcaaatggaatcgaatggaatcatcatcaagttgaatcaagtgaaatcatggaatggaatcgaatgga

SEQ ID NO: 7376 - DNA, 158 bp, Protomyxzoa rheumatica
gtaatatatacttttggtactttgatatattatgtacagtgtatattacatactttgggtactttgatattttatgtgcagcatatctatatatttgatgtacgttcatattttatgtacagtataaaatgtatacatgggcaactttaatatattat

SEQ ID NO: 7377 - DNA, 141 bp, Protomyxzoa rheumatica
tgtggttttaatttgaagatatttccttttccaaaacaggcctcaaagctctccaaatatccacctggttattctgcaaaaagagggtttcaatactactcaataaaaaggaagattcaactctgtgtgaggaacgcattc

SEQ ID NO: 7378 - DNA, 116 bp, Protomyxzoa rheumatica
aataaaaaggaagattcaactctgtgtgaggaacgcattcatcacaaagaagtctttctgaatgcttctgtgtagcttttatatgaagatatttccttttacaccacagggtgcaa

SEQ ID NO: 7379 - DNA, 141 bp, Protomyxzoa rheumatica
cttatttgtggtgtgtgtattcaactcacagagttgaacattccttcagaaagagcagatttgaaacactcattttgtggagtttccatgtggagatatccatcgctttgagaccaaaggtagaaaaggaaacatcttcgt

SEQ ID NO: 7380 - DNA, 140 bp, Protomyxzoa rheumatica
ccaaatatgcacttgaagattctacaaaaacattgtttccattctgctcaatcaaaagaaagattcaactccatgagataaatgcacacatcacaaagaggtttctcagaattcttctctctagtttttatatgaagata

SEQ ID NO: 7381 - DNA, 113 bp, Protomyxzoa rheumatica
agaatctctctttttgtagaaaatgcaagtagatatttggggccccatttcgccctgtggtagaaaacaaaacatcttcacataaaaactacacggaagcattctgagaaact

SEQ ID NO: 7382 - DNA, 125 bp, Protomyxzoa rheumatica
aaagcgcaacaaatgtccacttggagactctacgaaaagaatgtttcaaaactgttctatgaaaagcaaggttaaactctgggagttgaacacatgcctcacaaagaagtttctgagaaggcatc

SEQ ID NO: 7383 - DNA, 147 bp, Protomyxzoa rheumatica
cggaagaattctgaggaacctctttgtgacgtgtccattcttctcacaaagttgaaaatttcttttgattgagtagtttggaaatactctttttgtagcatctgcaagtgaacatttggagcactttgtggcctatggtataaaagg

SEQ ID NO: 7384 - DNA, 141 bp, Protomyxzoa rheumatica
gagtggagtggagtggagtggagtggagtggaatggaatgtagtggaatcaaattgaatggaatggaaagcaatggaatggaagagaatggaatgaagaagtgaaatatgagctgagattgtgccactgcactccagcatg

SEQ ID NO: 7385 - DNA, 262 bp, Protomyxzoa rheumatica
gtagaatctgcaagtggatatttggagcgctttgaggtctagtttgggaaaggaaatatcttcacatataaactacacagaagcattctgggaaacttccctgtgatgtgtgcattcatctcccagagttgaacctgtcttttgattgagcagatttgacacactctttttgtagaatcagcaggtggatatttggtgggcttggaggcctattgggaaaatgaaatatcttcacataaaaactacacagaagcattctgag

SEQ ID NO: 7386 - DNA, 151 bp, Protomyxzoa rheumatica
tttcgtagaatctgcaagtggatatttgggctgctttaaggccttggttggaaaagggaatatcttcacataaaaattagacaggaggattctcagaaacttctttgtgatggttgcattcaactcacagaattaaacacaccttttcata

SEQ ID NO: 7387 - DNA, 257 bp, Protomyxzoa rheumatica
tttccgacgaaggcctcaaagcagtccaaatatccacttggagattctacgaaacgagtgtttcaaaactgctctatgacaaggtatgttcaaatctgtgagttgaatgcacacatcacaaagaactttctgagaatgcatctgtctagtgtttatgtaaagatattcctgtttccaaagaaaacctaaaagcagtccaaatatccacttgcagattctacgaaaagagtgtttcaaaactcctctatgaaaaggta

SEQ ID NO: 7388 - DNA, 139 bp, Protomyxzoa rheumatica
cagacaaaacgaagtagtttctaggaatgcttctgtctgaagatatttcctttttcatcataggactcaaagcccttcaaatatccatttgcagatactacaaaaatactgtttccaaactccttaatgaaaagaaagg

SEQ ID NO: 7389 - DNA, 361 bp, Protomyxzoa rheumatica
ggaatcatatggaatggaattgaatggaatggaataatatgaaatggaatggaaaggaatggaatgcacttgaattaaatggactggaatggaatggactcgaacggagtggaatggaaaggattgaaatagaatggaatggactcctttggaatggtctagtatggatgcaatcgactggcagggaatcaaaaggaatgtaatcgaatgtattggactggaatacagtggactcgaatacattggaaacggaatgcaatggaatggaatggaatagtatggaatggaacggaaaggaatgaagtagaatggactagagtggaatggaatggactcgaaagcaatggactggaatggaacg

SEQ ID NO: 7390 - DNA, 162 bp, Protomyxzoa rheumatica
tgtgacttgaatagaaacatcccaaagaagtttctgagaatgcttctgtctagaatttatctgaagacaatcccgtatccaacgaaatcctcaaggctaggcaaatatatacttgcagaatacagaaaaagagtgtttcaaaactgctccttcaaaacggtg

SEQ ID NO: 7391 - DNA, 336 bp, Protomyxzoa rheumatica
aactgctttgtgatgtgtgcattcatctcacagagttgaatttttcttttgattgagcagttttgaaacgctcttttcgtggaatgtgaaagtggatatttggagggttttgaggcctacggtggaaaaggaaatgtcttcacataaaaactacaaagaaggattctgagaaacttatttgtgatgtgtgcaatcaactcacagacttgaacatatctttggattgagcagctttgaaactgtctttttgtgcaatctgcaagtggatattttgagccctttgtggcctatggtgaaaaaggaaatatcttcagataaaacctacaaagaagcatt

SEQ ID NO: 7392 - DNA, 127 bp, Protomyxzoa rheumatica
attccattccattccgttccattgcattccataactttcggattgattcttttcaactcccttactttccattacattccagtccattcgggttgttccatttcattccattccattccactccatt

SEQ ID NO: 7393 - DNA, 135 bp, Protomyxzoa rheumatica
agaatcatcgaatataatagaattgaatcatcatcgaatggacacaaatgaaatcttcatcgaatggactcgaatgaaatcataattcaatggaatcgaatggaatattcgaatagacatgaaaacaatcatcat

SEQ ID NO: 7394 - DNA, 161 bp, Protomyxzoa rheumatica
ttatcatcgatatcattcaaaatctaatacatcttctgtgtcctcaagttttctcatccttaatgcctccatttttgcgttttccatttacttattcaaccaatatttgagggcctactatgtgtggtagggacacagtttgaacaggcaggtctggttag

SEQ ID NO: 7395 - DNA, 129 bp, Protomyxzoa rheumatica
ctcacagagttgaacctttctgttgatagagcagtttggaaacactcttttcgcaaaatctgcagagtggatatttgtactgcttagaggccttcgttggaaacgggaatatctccacataaaaactag

SEQ ID NO: 7396 - DNA, 168 bp, Protomyxzoa rheumatica
taaaataaaagttcccaaagtatgtattatatactgtacataaaatatgaaggtaccgaaacatttataataaactgcatataaaatatcaaagtactcaaattatatactttacatgaaatatcaaagtaccaacactatatattgtatactgtacataaaatatca

SEQ ID NO: 7397 - DNA, 181 bp, Protomyxzoa rheumatica
tcttttgatagagcagtgttgaaacacactttttgtagaacccacaagtattcatttggagcgctttgttgcctatgtgggaaaaggtaatatcgtcacctaaacactagacagaagcattctctgaaactcctttgtgatgtgtgtgttcaattcacatcgttgaacctttcttttgata

SEQ ID NO: 7398 - DNA, 176 bp, Protomyxzoa rheumatica
ggaatggaatggaatggaataaaatggaatggaatggaatagaatggtcaaatgaaatctgagctgagattgtgccagtgcactccatcctgggtgagagagtgagatccaatcgaaagaaaggaatggaacggattggagtggaatggaatggaatggaatggaatggaatggaa

SEQ ID NO: 7399 - DNA, 231 bp, Protomyxzoa rheumatica
ttctgtttagtcagctgaaattatcccgtttctaatgaattcctcagagaggtccacatatgcacttgcagattctgcagaaagggtgtttctaaactgctacatcgcaaggagtgttcagctctgtttgctccactcaatcatcccaaagaattttctgagaaagcttctgtcttctttctataggaagttatttcctttactacggtaggcctcaaagaagtgcaatta

SEQ ID NO: 7400 - DNA, 489 bp, Protomyxzoa rheumatica
tggaatggaatggaatggaatggtgaaataaaatgtgagcaaagattgagccactgcactccagtctgggtgacagagtgagttccagtcgaaataaaagaatggaacggaatggaggagaatggaatggaatggagtggagttgaatggaatggagtgaaatggagtgtagtggagtggaatggagtgttgtggaaaggagtggagtggaatggagtggaatggaatggaatggaatagagaggaatggaatggaatagaatggaatggagtggagtggaacccagtacggtgcaaaggaggggaacggagtgaaatggaatggaatggaatggagtggaatcgaatggaatggagtggaatggaatgcaatggagtggagtggagtagaatggagtgaaatggaatggaatggaatgcagtggaattgaatgcagaggaatggagtggagtggagtggaatggagtggagtggagaggaatggaatg

SEQ ID NO: 7401 - DNA, 154 bp, Protomyxzoa rheumatica
attgcattccattctattccattccattgcattccattcctttcgattccattccattcgaatcaattacattgcaatgcattactttcatgccctttctattaaagtccaatgcattatggtccattccattcaattccattctattccattc

SEQ ID NO: 7402 - DNA, 137 bp, Protomyxzoa rheumatica
atgaaatggaaaggaatagaatggaatggaatccgatggaactgaaaggaaaggaatggagccgaaaggaaaagaatcaaattgaatggcatcgaatggaatgggatggaatggaatagacccagatgtaatggact

SEQ ID NO: 7403 - DNA, 180 bp, Protomyxzoa rheumatica
aaaactatgcagaagcattctgagaaactactttatgatgtgttcattcatctcacagagtagaacctttctttggattgagctgttttgaaacagtctttttttcgaatctgcaagtggatatttggagccttttgagacctatagtggagaaggaaatatcttcacataaaaactatg

SEQ ID NO: 7404 - DNA, 135 bp, Protomyxzoa rheumatica
ctattttaggaaaatacattcagaacacagcgggagtgttctggagtcctatgtgtgggacaaatattcagactctcgtagcagtgttccggaatcctatgagagggacaaatactcagaaacccacagcagtgt

SEQ ID NO: 7405 - DNA, 158 bp, Protomyxzoa rheumatica
cccagcagcagtgttctggaatcctatgtgagggacaaaccttcagacaatcatagcagattctggaatactatgtgtgggacaaacattcagacaccagtagcagtgttctggaatgctatgtgcgggacaaacatttaaacaacatagagagtgtt

SEQ ID NO: 7406 - DNA, 184 bp, Protomyxzoa rheumatica
tcaattattatattacatttaatatatataatataagatgcaggatgtgaaacaatattatatatatgttatttatattatatatatgatactatatattattgtatacataatgtgtatatatatttgtgggtgccctatttcccatctcataacttgttttaagaagcgcagcataataatg

SEQ ID NO: 7407 - DNA, 220 bp, Protomyxzoa rheumatica
ttcacagctatccaaatatccacttgcagatagtacaaaaagagtgtatctaaaatgctctgtcaaaaggatagttcttctctgctagttgagtacatacgtcataaagaaatttctgagaatgttcctgtctagtggttatgggaagatatttgctttttccctgtacacctcaaagcgctccaaatgtccacttgcacatactacaaaaagagtgctt

SEQ ID NO: 7408 - DNA, 346 bp, Protomyxzoa rheumatica
gagatccattttggagaaggagatatctttatataaaaaccacacagaagcattctgagaaacatctttgtgaggtggacactgaagtcacagagttgaaactatcttttgattcagcagttttgaatctctctttttgcagattctgcgagtggatatctggagaactttgaggcctatatggaaaaggaaatatcttcacataaaagcaaggcagaagcattttgagaaacttctttgtgaggtgtgcattcaactcacagagttgagcttatcttttcattgagcactttcatatctcatttttgtagaatctgcaagtggatatttggagctctttgcaccc

SEQ ID NO: 7409 - DNA, 492 bp, Protomyxzoa rheumatica
tataaatcataaagaatcctgtaggcagagcatagacaagagtaccctccccagagtgatcagtgcagagatgtgtcacaaagcccatgtaggcagagccttgacaagagtttcatcacttggtggatcagttcacagatgtgtcaaaatgtccatgtaggcaggtctaagacaagagtccatcacccgggtgatcagtgaagggatatgtactaatgtcccctgcagtcagtgcctagacaagagttgcctcacctcagagatcagtgcagagatatgtcacaaagcctcctgtaggcaaagcccatacaaggctcacatctcctaggtgaccaatacagtgatatgtcacaaaagtccctgaagacagagcctaggaaagagttacatcacctggtttttcagcgcagatacttgacacaatgcccccatagacagaacctagacaagacttccatcacctgggtgatcagtgcagagatatgtcacaat

SEQ ID NO: 7410 - DNA, 318 bp, Protomyxzoa rheumatica
ttcctgtccattccattcgattccatcccattcgactccattccattcgattccattctattcaagtgcattgtattcgcggccattccaaaggagtccattacattcgagtccgatagattccattctatttgattgcattccattcgattcctttccaatcgattgcattccattcgagtccattccaatggatttcattccattcaagtccattccatacgagtccattgcattccagtccattgcattcgattccattccattccagtccattacattcgattccattccattccattctattccatgccattc

SEQ ID NO: 7411 - DNA, 187 bp, Protomyxzoa rheumatica
ttctcagaattcttctgcttattttttattttaacatatttccttttccaccatgggcctcaaagccctccaaatgtccacttacagattctacaaaaacagtgtctccatactgctcaataaaaagaaagtttcaactccgtgagaggaatgcacacatcacaaagccattcctcagaattcttct

SEQ ID NO: 7412 - DNA, 283 bp, Protomyxzoa rheumatica
gagtgcattcagttccatttgatgatgattccaaaggactccatttgatgactccattcgactccattcatcaatgattccattggattccattcaatgatgattccattcaatttcattcgatgatgattccattcaatcccattcgatcatgattccattcgattccattccatgatgattcctttcgattccattcaatgattccattcctgtccaatcaatgatgattccattcgtgtccattcgatgattcagttctagtcccttcattgattccatc

SEQ ID NO: 7413 - DNA, 584 bp, Protomyxzoa rheumatica
ttctgagaatgcttctgtctagtttttatgtgaagatattcccgtttccaacgaggtccttaaagcagtccaaatatcctcttgcagattctacaaaaagagtgtttcaaaactgctctacgaaaagttattttcaactctgtgagttgaatgcaaatatcacaaagatgtttttgagaatgcttctgtccagtttttatgtgaagatatttccttttccactgtaggcctcaaagctctcttggctttgcacttgcagattctacaaaaagaatgtttcaaactgctccttcaaaagagtggttcagctctgtgagttgaatggcctcatcacaaagaagtttctgagaatgcttctgtctaatttttatgttaagatatttctgtttccactgaaggcctcaaagcagtccaaatatccccttgcagatactacgaaaagagtttttcaaaactgcgctatgaaaaggtatttcatctctgtgagttgaatgcaaacatcacaaagaagtttctgaaaatgcttctgtcttctttttatgtgaaggtatatcattttccaccataggcctcaaagcttccca

SEQ ID NO: 7414 - DNA, 559 bp, Protomyxzoa rheumatica
tgtctagtctagttagaatgtgaagatatcccgtttacaaagaattcctccgagagctctaaatatctggaagcagattctacaaaagcagtgcttcaaacctgctctatcaaaggaaaggttcagctcggggaattgaacacaaacatcacaaaggagtttctgagaatgcttctgtctagtgtttctatgaagataattctttttctaccataggcaacaatacgctgcaaatgaacacttgcagatttcacaaaaactgtgttttaacactgctctatcaaaacaaaggtccaagtctgtgagttgactgcacacatcacaaagcagtttcggagaatgattctgtctagctttttatgtaacgatattttctttgcaccagaggcaacaaagcacacggaatgaaatcttgcggattctacaaaaagtgtgtttcaacactgctctatccaaagaaaggttcgagtccgtgagttgaacgcacacaacagaaagcagtttctgaggatgcttctgtctggtttgtatgtgaagtcatttccttttccatctaaat

SEQ ID NO: 7415 - DNA, 134 bp, Protomyxzoa rheumatica
aaatatcttcacataaaaactatgcagaagcattctgagaaactactctgtgatgcgtgcattcatctcacagggtacaacctttctttggattgagcagttttgaaacactctttttgtagaatctgcaagtg

SEQ ID NO: 7416 - DNA, 280 bp, Protomyxzoa rheumatica
attcaactcacagagttgaacctatcttttgattgagcagttttgaatctctcattttgcagaatctgcaaggggatatttggagccctttgcggcctatggtggaaaaggaaataccttcaaatgaaaagcacacagaggcattctgagaaacttcctcgtgattgtgcattcaactcacagagttaaacctatcttatgattgaccagttttggaacactgttttcacaggatctgcaagtggatatttggtgtgctttgaggcctatcgtggaaaag

SEQ ID NO: 7417 - DNA, 133 bp, Protomyxzoa rheumatica
ggagaaggaaataccttcacataaaaaccagacagaagcagtctcagaaacttctttgagttgtttgcattcacctcacagagttgaacataagttttcatagagcagttttgaaacactattttcataggat

SEQ ID NO: 7418 - DNA, 124 bp, Protomyxzoa rheumatica
atggtgaaacgaaatgtgagctgagattgtgccactgcactgcagcctgggttacagagtgagatcctgtcgaaagaaataaatgtaatgggatggagtggaatgtaatggaatggaatggaat

SEQ ID NO: 7419 - DNA, 235 bp, Protomyxzoa rheumatica
tttggagaaggagatatcttcatataaaaactacacagaagctttctgagaaacacccttgtgaggtgtgcattgaagtcacagagttaaacctatcttttgattcagcagatttgaatctctctttttgcagaatctgcgagtggatatttggagtgcttggaagcctgctgtggaaaatcaaatatcttcacaaaaaaaactacacagaagcattctgagaaacttctttgtg

SEQ ID NO: 7420 - DNA, 141 bp, Protomyxzoa rheumatica
tcacttaaaaattacatggatgcattctgagtaacttctttgtgatgaatgcattcaccacacagagttgaaactttattttgattgactagttttgaaatactgtttttgtagaatctgcaagtggatatttggagtgct

SEQ ID NO: 7421 - DNA, 160 bp, Protomyxzoa rheumatica
cccattccattccactccattccactcctctccactccattctattagactacatcccattgcattccaccccattacactccactgcactccactccactccaatacactcaactccactccgttccattccattccattccattccattgcattccat

SEQ ID NO: 7422 - DNA, 145 bp, Protomyxzoa rheumatica
tccattccttgtgaatccattccattgcattccattcgagtccattccattccattacattccattcgtgtccattccattgctttcaagtcctttccattccatttcattcgagtgcattcccttccactccattgtattccat

SEQ ID NO: 7423 - DNA, 125 bp, Protomyxzoa rheumatica
ggtactttgatattttatgtacagtatataatacatacttgggtactttgatattttttgtacagtatataatacatactttgggtactttaatattttatgtatagtacataatacctactttg

SEQ ID NO: 7424 - DNA, 141 bp, Protomyxzoa rheumatica
tagctaccttcttgtttttatcctgggatattcgctttttcaactttaccaactatgacctcccaaacgtccatttgcagaatggacaaaaatactttttccaaactctgaatgaaaacgatggtttaactctgtgagttg

SEQ ID NO: 7425 - DNA, 323 bp, Protomyxzoa rheumatica
ttttgtagaatctgcaagtgttcatttggagtgctttcttgcccatggtggaaaaagaaatatcttcacgtaaaaactagacagaaacattctcagaaaatactttgtgatgtggttgttcaattcacagggttgaacctttctttagataaagcagttttgaaacactgcttttgtagaatcttcttgtggatatttggagctgtttgaggaattcgttttaaacgggatatcttcacattcaaactagtcagaagcattctcagaaactggtttgtgatgtgtgcattctactcacagagttgaaccttccttttgagaga

SEQ ID NO: 7426 - DNA, 141 bp, Protomyxzoa rheumatica
aaagacccatcacctggatgatcagctcagagtaatgtcacatagtccctttaggcaaatcctagacaatagttacatcacttggatgatcagtgcagaattatgtcacaatgccactgtaggcagagcctagacaagtgt

SEQ ID NO: 7427 - DNA, 193 bp, Protomyxzoa rheumatica
aatgctcacataacaaagaagtttctcacagtatttctgcctagtttttaagtgaagatattttcttttccgaaatagacctcaaagccctccaaatatcaacttccagactctacaaaagcagtgtttcaaaactgctcaatcaaaagaaattgtcaactctgtgagatgaatgtacacatcacaaagaagt

SEQ ID NO: 7428 - DNA, 268 bp, Protomyxzoa rheumatica
aagaaagcactccaaatgaacacttgcagattctacaaaaagtgtgtttgaaccctgctgtatcaaaagaaagtttcaagcctgtgagttgaatccccacatcacaaagcagtttctgagaatgcttctgcctagtttttaggtgaagatatatccttttccatcttaggcctcaaatctctccaaacatccacttgcagatacttcaaaaagactgtttcaaaactgctctcaaaaggaaggttcaactctgtgagttgaatgcaca

SEQ ID NO: 7429 - DNA, 148 bp, Protomyxzoa rheumatica
tccagaacactgctaagaggatccgaatgtttgtccctcacatacgattccaaaacactcctgctatgttctgagtgtttgtccctcacatagtattccagaacaatcctgctgtggtgtgaatgtttgtccctcacatagggttcca

SEQ ID NO: 7430 - DNA, 148 bp, Protomyxzoa rheumatica
aaatcaaatatgttcacataaaaactacacagaagcattcagagaaacgtctttgtgatgtgagcattcacctcacagagttgattctttcttttgatggagcagttatgaaacactgtttttgtagaatctgcaagtggatatttgg

SEQ ID NO: 7431 - DNA, 131 bp, Protomyxzoa rheumatica
tagttttaaagtgaagatatttccttttacaccataggccacaaatggctccaatatccacttgcaggctctagaaaaagagagtttcaaaacttcttgatcaaacgataggttcaactctggaaggtgaa

SEQ ID NO: 7432 - DNA, 198 bp, Protomyxzoa rheumatica
tgcagtatctggaagtggacatttcgagcgctttcaggcctatggtgaacaaggaaatatcttcccatacaaacttgacagaagcattctcacaaactggtttgggatgtatgtcctcagctaacagagtacaacctgtcttttgatacagcagtattgaaacactctttctgtagaatctgcaagtggatatttgga

SEQ ID NO: 7433 - DNA, 122 bp, Protomyxzoa rheumatica
atcttcacataaaaagtagacagaagctttctgacaaatttctttgtgatgtgcaagtttgtcacacggaattgaacccttattctgattgagcagtttggaatcagtctttttgtagaatc

SEQ ID NO: 7434 - DNA, 245 bp, Protomyxzoa rheumatica
gttctccagatatccactcgcagattctgcaaaaagagagactcaaaactgctgaatcaaaacatagtttcaactctgtgacttcattgcacacctcacaaagatgtttctcagaatgcttctgtgcagttttcatataaagatatctccttctccaaaatagatctcaaggttctccaaatattcacttccagattctatggaaagattgtctcaaaactgctcaatcaaaccaaaggttcaac

SEQ ID NO: 7435 - DNA, 199 bp, Protomyxzoa rheumatica
gaattccattctattccattgcattaaattccattccattccattcccttcaattccattccactccattccacacggcttgattcaattctattctattccattccgatccactccattccattgcattccactgcattcaattccactccccaggagttgattcaattccattctattccattcacttccattgcat

SEQ ID NO: 7436 - DNA, 143 bp, Protomyxzoa rheumatica
attctagaaagagagggtttcaaagctgctctgtcgaaaggaaagtacaactctgtgagttgaatgcaaacatcaccaagaaggctctgagcacgcttccgtttagcttttatgggaagattatcccttttccatcgaaatct

SEQ ID NO: 7437 - DNA, 200 bp, Protomyxzoa rheumatica
gaagatatatccttttctaccatagaccacaaaacgctccaaatatccccttgcagtttctactaaaagagtgtttccaaactgctcaatcaaaagaagtttcaactctgtgagatgaatgcacatatcattaagaagtttctcagtaattttctgtatggtttttatgtgaagatatttcctttcctactataggcctg

SEQ ID NO: 7438 - DNA, 601 bp, Protomyxzoa rheumatica
aggaatggaatggacaggaatagaatggaatcatacgtaatggtttgtaatgtaattgatttgaatggaatggaatcgaatggaatgtgatcaaacggagtggaatggaatgcattggaatggaatagaaagtaatgcagtggaatggattggactggaatcgaatggaatggaattcaacggaatggaatagaaaggaatggaatcgattggaatggattggaatgtaatggactcgaatggattggactggaagaaagtggaattgaatagattggaatagaatggaacagaatggaattgaatggaatggactcgaatgaaatggagtcaaatggaatggaatggaatggtatggaatggaatggaaaagaatggaatttaatataatccaaaggaatagaatggaatggttttaatggaaagaaatcgaatggaaaggagtcaaatggaatgtagtggaattgaatggactctaatggaatggagtggagtggaaatgacgcgaatggaaatgaaacgaatgaaatggatcgcaatgaatggaatggaatcgagcagattggattggaatggaaaggaatagaatggattggaatcg

SEQ ID NO: 7439 - DNA, 263 bp, Protomyxzoa rheumatica
atgcgcacatcacagagtagcttcagagaacaattatgtctagtttttccgtgaagatagtttctcttccacataggcctgagaccgctctaaatattcacttggaaattctgcaaaaagaatatttcaacactcttctatcaaaaggaaggtggaactctgagaggtaaacgcacacatcacagagaagtttctgagaattcttctgtcaaggtttgtatgaagaaaccccgtttccaatgaaggcctcaaaaaagtccaaa

SEQ ID NO: 7440 - DNA, 138 bp, Protomyxzoa rheumatica
caaagtacccaaactatatatagtgtactgcacataaaatatcgaagtacacaatgtatgtattatatactgtacataaaatatcaaactacccaaaatatgtattatatactgtacataaaatatcaaagtacccaa

SEQ ID NO: 7441 - DNA, 209 bp, Protomyxzoa rheumatica
tgcctacaggggcattttgacatatctctgcactgttaactgaggtgatgtaactcttgtctaagttttgcccagagggggattgagacacatctctgcactgattccttggtgatccaaatcttgcctggtctctgcctactggggagattgtgacatatctctgcactgatttctcaggtgctgcaactttagtctaggctctggct

SEQ ID NO: 7442 - DNA, 441 bp, Protomyxzoa rheumatica
tctgctctgtctaaaggaaggttcaactctgtgagttgaacacacacaacacaaacaagttactgagaattcttctgtctagcattatatggagaaaccccgtttcaaaataaggcgccaaagaggtccgaatatccacttgcagactttacaaacacactgtttccaaactgctctatgaaaagaaagtttaaactccgagagttgaacgcacacatcagaaagtagtttctgagaatgattctgtgtactttttatacgaagatatttcattttctaccactggtcacaaagcgcttgaaatctccacgtgcaacttccacaaaaagagtgtttcaaatctgctctatctaaaggaacgttctattctgtgagttgattacacacaacacaaggaagttactgagaattcttctttctagcattatatgaagaaatccc

SEQ ID NO: 7443 - DNA, 205 bp, Protomyxzoa rheumatica
gtctagtttttatacgaagatatttccttttgtaccattgacctcaatgcgtctgaaatctccacttgcaaattccacaaaaagagtggttcaaatgtgctctgtctaaaggaagggtcaactctgtcagtggaatacacacaatacaaagaagttactgagaattcttctgtctagccttacatgaataaaacccgtttccaac

SEQ ID NO: 7444 - DNA, 198 bp, Protomyxzoa rheumatica
agcgatttgaggcctatgatggaaaaggaaatatgttcacatacaaactagacagaagcgttctgagaaactgctttgtgatgtgtgcattcacctcacagagtggaacctttctttggatagagcagttttgaaacagtctttctctagtatctgcaagtgttcattttgagcgctttgaggcccatgatggaaaag

SEQ ID NO: 7445 - DNA, 164 bp, Protomyxzoa rheumatica
ttcaaaactgctcaatcaaaagaaagttttatctctgggagatgaatgcatatatgacaaggaagtttctcagaaagcttctgtgtagtatttatgtgaagatatttcctttccaaaaagcgtcaaagcccaccaaatatccacttgccgattctacaaaaaga

SEQ ID NO: 7446 - DNA, 130 bp, Protomyxzoa rheumatica
acaaagaagtttctcagaatgcttctgtctggtttttatgggaagatattgccttttccaccatagaccacaaagcgctccaaatatcctcttgcaggttctacaaagagagtgtttcaaaactgctcca

SEQ ID NO: 7447 - DNA, 147 bp, Protomyxzoa rheumatica
ggacttgaatggaatcatcattgaatggaatcgaatggaaacatctaatggcatcgcatggaagcatcatcaaatgaaatcgaatggaatcattgaatggccttgaatggaatcatcatctttggaatcgaatgaaatcattgaatg

SEQ ID NO: 7448 - DNA, 197 bp, Protomyxzoa rheumatica
ttcgattccattccactcaattccactccgttccattcctttgcgttcctttctcttccattccattgcattccattccattccattccatttgtttacattccattgaattccaatccagttgaatcaattacattgcagtccattacattcgagtctgttctatcccagttcattcgattctggtgcattccatt

SEQ ID NO: 7449 - DNA, 212 bp, Protomyxzoa rheumatica
ctgttctatcccagttcattcgattctggtgcattccattggattcctttccattcgataccattccatactattgcattccattcgattccattgttttcgaataaattccaaccgagaccattccttttgtgtcctttctatttgactgcattccatttgagtccattaaatttctgcacattccattcctttccattccattccattcc

SEQ ID NO: 7450 - DNA, 152 bp, Protomyxzoa rheumatica
aggctctggctacatggcattgtgacatatcactgcactgatcacccaggtgatataactcttgtctaggctctgcctacaatggtattgtgacatgtctcggcactgatcacccaggtgatataactattctctaggatctgaccacaggg

SEQ ID NO: 7451 - DNA, 131 bp, Protomyxzoa rheumatica
tcaatgatgattccatttgattccattcgatgatgatttcttttgagtacatatgatgatgattccattcgagtgcattcgacgatgattccatttgattccattcaaatgatgattccattcaattccat

SEQ ID NO: 7452 - DNA, 211 bp, Protomyxzoa rheumatica
taatccatggactggaaggcaatcatcatcgattggaatcgaatggaatcatcgaaaggactcgaatcaaatcctaaaatggactcgaatggaatcatcgaatgcactccaatggaatcatcaaatggactcgaatgaaatcatcatcaaacggaatcgaatggaatcattgaatggaatggaatggagatcggaagagcgtcgtgtaggg

SEQ ID NO: 7453 - DNA, 311 bp, Protomyxzoa rheumatica
caaacatcacaaaaagttcgtcagaatgcttctatgtagtttttatgtgaagatattttttccaccttaggccacaaagggcttcaaatatccacttgaagattctacaaaaagagagtttcaaaactgctgtatcaaaagataggttcaactatgtgacttgaatacaaacataacaaagaagtttctcagaatgcttctgtgaagtttttacgtgaagatatttccttttccatcataggccacatagcactccaaatatccacttgcggattctacaaaaacagtgtttccaagctgcacaatcaaaa

SEQ ID NO: 7454 - DNA, 165 bp, Protomyxzoa rheumatica
cacatcacaaagaagtttctcagaatgcttctgtgtagttgttatgtgaagatatttccttttccacaatatggctctgagggctccaaatatccagctgcagattctactaaaacagtgtttccaaactgctaaatcaaaataaaggttcaacactgtgagatg

SEQ ID NO: 7455 - DNA, 531 bp, Protomyxzoa rheumatica
agtgtttccaaactgctccatcaaaagaaagtgtttaactctgtgaggtgaaagcacacatctcaaagaagtttctccgaaagcttcggactagttttcatgtgatgatatttccagtctcaccataggcctcaaaggactaagaaatatccctttccagattctaaaagaccaccatttccatacttctcaatcaaaagaaaggttaaattctgtgaggttaatgcacacatcagaatgaagtttctcagaattctcctgtctagttttcatgtgaagatatttactatttcactataggcttcaaatgtctcaaaaatatccctttgcagattctacaaaaatatgctttccaaagtgctgaattaaaagaacccttcaactctgtcagatgaatggagaggcatcacaacgaagatcctcagaatgcttctgtctagtttaaatgtgaagatatttctttttcaccatagacctcaaagggctcagaattagacctttgcagattgcagagaaagactgtctctaaac

SEQ ID NO: 7456 - DNA, 151 bp, Protomyxzoa rheumatica
cgaaatacaatagtatggagtggcattgaatggaatggaattgaatggaatggaccggaatggagtggactggaatagaatgaactcgaatgtaatggattgcaatgtatttgattcaaatggaatggaatcgaatggaatgtaatcaaat

SEQ ID NO: 7457 - DNA, 117 bp, Protomyxzoa rheumatica
ggaatctgcacatggataggtggaactctgtgaagatttccttggaaacgggaatatcttcacttaaagagtaaacggatgccttctcagaaacttctttgtgaggcatgtgttcaa

SEQ ID NO: 7458 - DNA, 152 bp, Protomyxzoa rheumatica
acataaaaactagacagaagcatcctcagaaagtttttgtgatgtttgcattcaactcacagagtagaacataccttttcacagagcagttttgaaacactctattcgtggtatctgcaagtggatatttggactgctttgaggccttcatt

SEQ ID NO: 7459 - DNA, 223 bp, Protomyxzoa rheumatica
atggaatataaagaaatggaatcgaagagaatggaaacaaatggaatggaattgtatggaattgaatcgaatcgaatcgaatgtaattgaacggaaaaaatgcaactgaatagaatcgaaaacaatggattcgactggcatctaatagaatgaaatggaatgcgttgaggtggagtggattgtaatggagttgaatggaatggggtgtaattgaattgaatgg

SEQ ID NO: 7460 - DNA, 142 bp, Protomyxzoa rheumatica
acccagaagatgtaacccttgtctaggctctgccaaaatggggcattgtgacataactctgcactaatcactcaggtgatgggactcttgtctaagctgcgcctaaaggggaattgtgacagatatctccacggatcaccca

SEQ ID NO: 7461 - DNA, 175 bp, Protomyxzoa rheumatica
cagaaatcttctgtctagtttttatgtgaagatatttcctgttccaccataggcctcaaaacgctgcaaatgtccaattgcagattctacattaatagagtttcaaaattgctcaaccaaaaggaaggtttaattttgtgagatgaatgcacacatcacaaagaagtttctcaga

SEQ ID NO: 7462 - DNA, 145 bp, Protomyxzoa rheumatica
ctgcctacaggcacattgtgatgtatctctgcactgatcaactaggtcatgtaacacttgtctagactctgcctgcagtggcattgtgacatatttctgcactgatcatccaggtgatgtaacacttgtctaggatctgcctaaa

SEQ ID NO: 7463 - DNA, 187 bp, Protomyxzoa rheumatica
acagtatataatatatatttgatgtactttgatatattatgtagagaatataatatatatttgatgaaccttcatattttatgtacattatataatagataacatgtgtattttgatattttatgtacagtatgtaatgcattctttgggtactttgatattttatgtgcagcatataatatatatt

SEQ ID NO: 7464 - DNA, 289 bp, Protomyxzoa rheumatica
atcattctcagaaaacactttgtgatgtgtgtgttcaactcacagagtttaacctttctttaatcgagcagtttggaaatacactctttgtaaatctgcaggtggatatttggccctctttcagcccttcgttggaaacgggatttcctcatataatgctagacagaagaattctgagtaacttctttgtgttgtttgtattcaactcactgatttgaaccttcctttagagagagcagatttgaaaccctctgtttttggaatttgcaagtgcagatttcaagcgctt

SEQ ID NO: 7465 - DNA, 190 bp, Protomyxzoa rheumatica
ggaatggaatggaatggtatggaatggaatggtgaaatgaaatgtgagctgagattttgtcactgcactccagcctgggtgacacagtgagatccttttgaaagaaaggaatgcaatggaattgagtggaatggagtggagttgagtgcagtggagtggaatggagtggagtgcagtggagtggaatgga

SEQ ID NO: 7466 - DNA, 159 bp, Protomyxzoa rheumatica
atttggaaagctttgaggcctgtggtggaaaaggaaataccttcacataaaaaccagatggaagcattctcagaaacttctttgtattgtttgcattcaacccacagagttgaacataccttttcacagagcagttttgaaacactccttttgtagaat

SEQ ID NO: 7467 - DNA, 338 bp, Protomyxzoa rheumatica
aatgaaatggagtcgaatgtaatggaattgaattgaatggaatcgaatagaatggaaatgaatggactgtaaaggaatacaatggaatggagtgtaatggaaagatatcgaatggaatggaatagaatggaatggaatggaatacactggaatggaatgcactgaagtggaatggtctccagtggaatggaatggaatgcaatgaaatggaaaggaatagaatggaatggaatccggtggaactgaatggaaaggaatggagacgaatggaaaagaatcaaattgaatggcatcgaacggaatgggatggaatggaatagacccagatgtaatggact

SEQ ID NO: 7468 - DNA, 137 bp, Protomyxzoa rheumatica
ggaatggactcgaaaggaatagactggaatggaaccctctcgaatgaagtggagccgaatggattggaattgaaaggaatggattcgaatggaatgtaaaggaattgaatggaatagaatggactcgaatgtaattg

SEQ ID NO: 7469 - DNA, 629 bp, Protomyxzoa rheumatica
tactacaaaaagactgttcccaaactgctcaataaaaagaaagtttcaactctatgagataaaagcaaatatcacaaagaagtttctcagaaactttctatctagtttttatgtgaacatatttcttatcaccccatagacctcaatcggctcacaagtatccttctgcagattgtaaaaaactactgtttccaaaccgctcaatcacaggaaaggtttaactctgtgaaatgaatgcatccatcacagagaagtttctcagaatgcttccgtctcgttttcatgtgaagaagattccttttccaccatattcctcatgcgctccaaataaacacttgcagattccgctaaaagagtgtttcaaaactgctcaatcaaaagaaaggttctagtcggtgagatgaatgcacacatcacaaagaagtttctatgaatgcttctgtctgatttatattgaagatatttcctttttcaccgtaggcctcagagtgcttaaaatatccatttgcagatactagaaaagactgtttccaaactgctcaatcaaaataaagttcaactcagtgagatgaatgcacacatcaccaagacgtttctgagaaagattctgtctcgtttttatgtgaaga

SEQ ID NO: 7470 - DNA, 141 bp, Protomyxzoa rheumatica
ccttctgtctagtttttatttgaagatatttctttttccaccatacgcaacaaggcgctccaaaggaactcttgcggattctacaaaaagcgtgtttctacactgctctatcaaaagaaagtttcaagtctgtgagttgaa

SEQ ID NO: 7471 - DNA, 238 bp, Protomyxzoa rheumatica
cagtccattaaactccattctattccattcctttcttttgacagtatctcactctgtcactcaggctggtgtgcagtggcacaataacagctcccatttcatttcatgattccattccattccattccatcccatcccatcccattctactccattccactccactcctctccactccattacattccactccatgccattccattccattccattccactccactccacttcactcc

SEQ ID NO: 7472 - DNA, 151 bp, Protomyxzoa rheumatica
tcatcgaatggactcgaatggaatcatcattgaatggaattgaaaggaatcatcaaatggagttgaatggaatcattcaaagaactcaaatggaatcatcatcgaatgaaatcgaatgaagtcatcgaatggatatgaatggaatcatcat

SEQ ID NO: 7473 - DNA, 134 bp, Protomyxzoa rheumatica
agaaaggttcaacactgtgagatgaatgcacacgtcacaatgcactttcttagaatgcttctgtctagcttttatgggaagatgtttccttttacaccataggctgcaaagcgctccaaatatccctttcagat

SEQ ID NO: 7474 - DNA, 147 bp, Protomyxzoa rheumatica
aataagtcttttgatagagcagttttgaaactgtctttatgtaaaatgtgcaagtggatatttggagccctttttggccaatggtggaaaaggaaatatctttccctaaaactacacagaagcatgcttagaaacttctttgtgatg

SEQ ID NO: 7475 - DNA, 134 bp, Protomyxzoa rheumatica
tttctttttagtttttatccagtgatattagttttttttccccataggccacaatgggcttcaaattgtccctttgcatattctccaaaaagtgtttccaacatactgaatcaaaagagtggtttaactctctg

SEQ ID NO: 7476 - DNA, 238 bp, Protomyxzoa rheumatica
ataaaatataaaagtacccaaagtatgtattatatactgtgcataaaacatcaaagtgcccaaagtatgtattacatactgtacgtaaaatatgaaagtacccaaacttttataataaagtgtacatacaatatcaaagtactcaaactatcttctgtacataaaatattaaagtatgaaatctatatattttatcctggacataaaatatcaaagtactcaaactatatattgtata

SEQ ID NO: 7477 - DNA, 142 bp, Protomyxzoa rheumatica
ttttgatagaccagttatgaaacactctttttgtagaatctgcaagtaaatattggacttttttgaggccttccttggaaacgggatttcttcatataaaccttgacagaagaattctcagaaacttctttgtgatgtgtgc

SEQ ID NO: 7478 - DNA, 148 bp, Protomyxzoa rheumatica
ataatataggttcaactctgtgagatgaattcacacatcacaatgaagtttctcagaatgattctgtgtagtttctatgggaagatatttccttgaccaccataagaaacaaagggctccaaatatccacttgcagattctacaaaaa

SEQ ID NO: 7479 - DNA, 164 bp, Protomyxzoa rheumatica
tccattccattccattccatcccatcccattccattccattccattccactcgggttgattcgactccatcccattgcattacattccgtttcatttcactcgggttgattccattccgttcccatccattccactcgtgttgattccattccgttcctttcca

SEQ ID NO: 7480 - DNA, 148 bp, Protomyxzoa rheumatica
ttagattctacaaaaaggctctttccaaactcctcaatcaaaagaaaggttcaactctgtaagatgaacgcagacatcacaaagatgtttcccagaattcttctgtctagtttttatgtgaagatatttcattttccaccagaggcct

SEQ ID NO: 7481 - DNA, 159 bp, Protomyxzoa rheumatica
caggggcattttcacatatcactgtactgatcatggagataatgtaactcttgtataggctttgcctacaggggtcattgagacatatctctgcactgataaccgaggtgatgtatctcttgtctatgctctgcctactggagacattgtgatatatct

SEQ ID NO: 7482 - DNA, 137 bp, Protomyxzoa rheumatica
acagtatataatacatgctttgggtattttgatattttttctacagtatagaatatttaccttggggactttattttatgtacagtatataatatatagtttgcaaactttgatatttcatgtagagtatataatat

SEQ ID NO: 7483 - DNA, 174 bp, Protomyxzoa rheumatica
tgagaaacttctttgtgatgtgtgcattcatctcacagagatgaacatttctcttgattgagcagttttgaaacaatctttttgaagtatctgcaagtgaatatttggagcactttgaggcccattgtgtaaaagaaatatcttcacataaaaactacacagaagctttctgag

SEQ ID NO: 7484 - DNA, 122 bp, Protomyxzoa rheumatica
tgcaagtgttcacttggagcgtttttttgcctatggtggataaagaaatatcttcacatacaaactagacagaagcaatctcatttactgctttgtgatgtgtgcattcagctcacagagtt

SEQ ID NO: 7485 - DNA, 133 bp, Protomyxzoa rheumatica
tccattcgatgattctattcgaatccatttgatgattgcttttgatatttgatgattattccattcgagtccatttgatgtttctattcaattccattcattgatgattccattcgagtccatttgatgattc

SEQ ID NO: 7486 - DNA, 247 bp, Protomyxzoa rheumatica
tttatatactgtatataatatgtagtttgagttctttgatattttatatacagtttattataaatatttggttactttcatactttatgtacagtatataatacatatttttggtactttgttattttatgtacaatatataatatatatttgctgtactttgatatattatgtgcagaatataaaatatatttgatgaaccttcacattttatgtacagtatataatatacactttgggtactttg

SEQ ID NO: 7487 - DNA, 270 bp, Protomyxzoa rheumatica
tttgaaaaatctgcaagaggatatttggagcactttgaggcctattgtggacaagtaaatatgataacataaaaactataaagaagcattctgagtaacttcatttgatgtgtgcattcaccacacagagttgaagctatcttatgattgagcagttttgaaacactctctttgtagaatctgcaagtggatacttggagggatttcaagcctgttgtggaaaagagaatatcttcacataaaaactacacggaagcattctgagaaact

SEQ ID NO: 7488 - DNA, 154 bp, Protomyxzoa rheumatica
gaatctgcaagtggatatttggagcgctttgaggcctacttttgaaaatcaaatatcttcccttaaaaactacacagaagcattctcagaaattgtttgtcatgtgtgcttcctaatcaccgagttgaacctatcttgtgattgagcagttttg

SEQ ID NO: 7489 - DNA, 140 bp, Protomyxzoa rheumatica
gaaacagtccttttgtagaatctgccaagggatatttctgagcccattgagtactatgatgcactgtgaagtatcttcacataaaaactagacagaagctttctaagaaacttcggtgtgatgtgtgctttcatctcaca

SEQ ID NO: 7490 - DNA, 252 bp, Protomyxzoa rheumatica
tatgtgaagatatttccttttccaccataggcatcaaagtgctccaaatgtccacttgcaacttctactaaaggagggtttcaagactactcaatcaaaagaatgttttaactctgtgagatgaatgcacacatcataaagaagtatctcagattgtttctttctagattttatgtgaaaatatttccttttctaacttaggccgcaaagtcctccaaatgtccacttgcagattctacaaaaagagtgttt

SEQ ID NO: 7491 - DNA, 160 bp, Protomyxzoa rheumatica
acaaagaaggttgtcacaatgcttctgtctagtttttatgagaagacatttccttttccaccatcggcctcaaagtgctccaaatgtccaaatgcagattcaacaaaaagagtgtttcagaactgctgaatgaaaggtaaggttcaactctgtgagataa

SEQ ID NO: 7492 - DNA, 202 bp, Protomyxzoa rheumatica
aatggattcgaagggaatgaaatgcaatcaaaaggaatggaatcaaacggagtggaatggaatgcaatggaagagtgaaatggactcgaatgtaatggaagtgaatggaatggacacaaatggaatagaatggagtggaaaataatggaatggaatggaatggacaccaatggaaagcaattgaattaaatgaactcgaaag

SEQ ID NO: 7493 - DNA, 149 bp, Protomyxzoa rheumatica
ttccttttccaccataggccgcaaagggctccaaatatccacttgcagattctacagaaggagagattcaaaactactcattcaaaggtagcttcaactctgtgagttgagtgcacacatcacaaagaagtttctcagaatgcttttgt

SEQ ID NO: 7494 - DNA, 158 bp, Protomyxzoa rheumatica
ttgtccctcacataggattccagaacattgctaagagggtccgcattattgtccctcacataagattccagaacaatgctaacagggtctgaatgtttgtccctcacataagattccagaaccctgctgcagtggtctgaatggctgatcctcacata

SEQ ID NO: 7495 - DNA, 125 bp, Protomyxzoa rheumatica
gattgtattcaatgatgattccattcgagtccatttgatgattcctcctgattctattcaattatgattccatttgagtccattcaatggtgattaaattcgatgccattcaatgattccattca

SEQ ID NO: 7496 - DNA, 124 bp, Protomyxzoa rheumatica
caactctgtgtgatgaatgcactcataacaaagaagtttctcagaaaggtcttgtctagtttttatgtaaagacatttcctttttcaccaaagtcctgaagggatcccaaatatcccattgcag

SEQ ID NO: 7497 - DNA, 146 bp, Protomyxzoa rheumatica
acgaaatatctttacatagaaactacacagaaggattctgagaaactactttgtgatgtgtgcattcatttgacagagttgacagtttcttttgattgagcagctttgaaacacagtttttgtagaatctgcaagtggatatttgg

SEQ ID NO: 7498 - DNA, 209 bp, Protomyxzoa rheumatica
gaaacactctttctgtagaatctgcaagtggacatttggagcactttgcaggctatggtggaaaaggaaacattttcacataaaaactagacagaatcattctgacaaacttctttgggatatgtgcattcatctgacagagttggaactttcttttgattgatcagttttgaaacacgttttgtagaatttgcaggaggacatttgga

SEQ ID NO: 7499 - DNA, 153 bp, Protomyxzoa rheumatica
ccattccatttgagtccattccattccattctattccatttgaatccattccattctattccattagagtctgtaccattatattccaatccagtaaattctgctctattccattcgagttcattcaattgcattccattccattccattcga

SEQ ID NO: 7500 - DNA, 300 bp, Protomyxzoa rheumatica
tcaaaactgctctctcaaaaggaaggttcaactctgtgagctgaatgcacacatcgcaaagcagttaatgagattgcttctgtctagtttgtatgtgaggatatttccttttcaaacttagacttcccatcgctccaaatatccacttgcagatatttcaaagagactgtttaaaaactgctctctcagaaggaaggttcacctatgtgagttgaatgcacacaccacaaggcagtttctgagaatgctgctgtctagtttgtatgtgaagatatcccgtttacaacgaattcctcaaag

SEQ ID NO: 7501 - DNA, 186 bp, Protomyxzoa rheumatica
gaatggaatggaatgcaatggaatggaatcaacccgactggaatggaatggaatgcaatgcaacgaagtggaatggaatggaaaggtatggaatggaatgcaaacgaatcaacacgagtggaatgtaatggaatgcaaaggaatgaaaaggaatgcaatggaatcaacccgagtggaatggaatgg

SEQ ID NO: 7502 - DNA, 169 bp, Protomyxzoa rheumatica
atagaatggaatacaatggcatggaatggaatggtgaaaagaaatgtgaactgagattgtgcactgcactccagcctgagtgacagagtgaaatcctgtcgaaagaaaggaagggaatggagcggatttattatggaatgtaatggaatggatttagaatggaatggaa

SEQ ID NO: 7503 - DNA, 258 bp, Protomyxzoa rheumatica
tagattttatatgaagatattcccgtttccaaggaaatcgtgaaagctatccaaatatccacttgcaggttcttcaaaaagagtgtttcaaaacagctctaccaaaagaaaggttcaactctgttagtcgagttcacacatcagaaaccagtttctgagaattcttctgtctagttaatttgggaagatatttccattttcaccgaaggtctcaaagcgctccaaatgtccacttccagataccacagaaagagtgtt

SEQ ID NO: 7504 - DNA, 135 bp, Protomyxzoa rheumatica
ggatatatcttcaaataaaaactagacagaagcactttgagaaacttctttatgagatgtgcattcatctcgcagacttgaacctttctttcgattgagcagctttgaatcactctttttgtagaatctgcaagt

SEQ ID NO: 7505 - DNA, 153 bp, Protomyxzoa rheumatica
aatacaggatcagaatatttatgaaaaaaactaaaaaggacttaaataactagcaacaaattccatattcctgtaccggaagacttaatgaagttaagatgaaaatactaccacccaaagtagtgtacagatgtactgtaatcccaatgttta

SEQ ID NO: 7506 - DNA, 210 bp, Protomyxzoa rheumatica
ctccaaatatccacttgcagattcttcaaaagcagtgtttcaaaaccgctcaatcaaaataaacattcaactctgtgaaatgaatgcacacatcacaaagaagtttctcagaatttttctgtgcagtttttatgtgaaattatttccttttccaccacaggctgcaaagggctccaaatatccacttgcagatactgcaaaaagagtgtt

SEQ ID NO: 7507 - DNA, 223 bp, Protomyxzoa rheumatica
actgctctatgaaaagaaaggttaaactctgtgagttgaaggcacacatcacaaactagtttctgcgaatgactctgtagttttaatacgaagatatttccatgtctaagataggcgtcaaatctcttgaaatctccacctggaaattccacaaaaagagtgtttcaaagctgctctgaataaaggaaggttcaactctgtgagttgaattcacacaacacaa

SEQ ID NO: 7508 - DNA, 298 bp, Protomyxzoa rheumatica
tcggattgattctattcaattcccttacactccattacattccactctattcgggtagtttccattccattccattccattcctctccattccattacactcgggttgataccattccattgcattccattccattccattcaattccattccgttccatgccattccattacattcggattgattctattcaattcccttacaatccatcacattcctttccattcgggttgtttccattcctttccattccattcaattccattccattccattccattccgtatgattccattcc

SEQ ID NO: 7509 - DNA, 122 bp, Protomyxzoa rheumatica
tatcattgaatggaatggaattgacactaatggaatgaaattgaatggattcgaatggaatggtatgtattggcatcgaatggcatgaaatgaactgggtgcaaatgtaatgtaatgtaatg

SEQ ID NO: 7510 - DNA, 226 bp, Protomyxzoa rheumatica
tgtagtacctggatgtggacacttggagcgctttgaggcttacggtgcaaaaggaaatatcttccaatgaaaactagacagaagcattctcaaaaactagtttgtgatgtatttcctcaactaacagagttgaacctttctatttacagagtagttttgaaagactctttttggagaatctacaagtggatatttgagagctttaaggatttcattgtaaaccgga

SEQ ID NO: 7511 - DNA, 122 bp, Protomyxzoa rheumatica
taatcatcattgaatgtaaacaaatggaatcactgaaaggactcgaacggaatcatcatcgaatggaatcaaatggaatctgtaaatgaactcgaatggaatcatcattgaatggaattgaa

SEQ ID NO: 7512 - DNA, 166 bp, Protomyxzoa rheumatica
gtgttctggaatcctatgagagggacaaacatttagaccctcttagaagtgttctggaatcctatgagagggacaaacatttagacccacgtaccagtgtgctggaatagtacgtgagggacaaacactcagaacacaacagcagtgttctggaatcctaagtgag

SEQ ID NO: 7513 - DNA, 200 bp, Protomyxzoa rheumatica
ttccattccattccattccattccattccattccattcccctcggcttgattcaattccattctactccattccattccattccattccactgaggttgattcaattccattctatcccattccattccattctactggggttgatacaattcgattctgttcctttcaattccattccattccattccattaaattcca

SEQ ID NO: 7514 - DNA, 150 bp, Protomyxzoa rheumatica
ccgaggtgatgtaacacttgtctagattctgcctacacgggaattcttacatatctccgcactgatcacccgggtgatggaactcctgtctacgttcagcctacaggagggttttgacatatctctgcactgatcacccaggtgatgtaa

SEQ ID NO: 7515 - DNA, 194 bp, Protomyxzoa rheumatica
cattccattacacttcactcgattccactccattccattccacacaattccacttcactctactccactccaatccactgcactccacttcattccattcaattccattttaaatccaatccaataatttccattctaagtccattccattcccttcctttctttcgacaggatctcactctgtcacccaggct

SEQ ID NO: 7516 - DNA, 152 bp, Protomyxzoa rheumatica
catgtgaagatatttatttttcaccattggcctcaaactgctcagaaatatccccttgcagtttctacaaaaaaactgtttccaaactgctcactgaaaagaaatggtcaactcttagatatgaatggaaatgtcacaaagagttttctcaa

SEQ ID NO: 7517 - DNA, 172 bp, Protomyxzoa rheumatica
caccattccactctattccattccactccattcgattccattcctttctttgagatgatctcactctgttacccaggctggagagcagtggcacaatttcagctcacatttcatttcatgagtccattccattctattccattccattctactccaccccactccactccat

SEQ ID NO: 7518 - DNA, 124 bp, Protomyxzoa rheumatica
acaaaaagactgtttcaaaactgctctattgaaagaaacgttcacttctgtgagttgaatgcacaaataacaaagaagtttcttagaattcttctgtcaagttttatatgaagaaatcccgttt

SEQ ID NO: 7519 - DNA, 177 bp, Protomyxzoa rheumatica
aagtgatcacacaggtgatgtaatacttgtctatatctgcctactggcggcattgtgacatatttctgcactgatcagccaggtgatggactcctgtcttggatctgcctatgggggcacagcgacatatctctgcactgatcagtcatctgatgtaacgcttgtctaagctgcgcc

SEQ ID NO: 7520 - DNA, 146 bp, Protomyxzoa rheumatica
cggtgatcagtgcagagatatgtctcaatgaccctgtcggtgaagcctataaaagagtcacatcatcttggtgatcagtgcagttatatgttaaaatgctcctgtaggcaaagcctagaccagagttacattacctgggtgatcag

SEQ ID NO: 7521 - DNA, 302 bp, Protomyxzoa rheumatica
gacaaatctttgcacggatcacctaggtgatgtatctcttgtctaccctctgcctaaagggggcattgtgaaatatctctgcactgatcaccaaggtgattcaactcttgtctaagatctgcctacagggggtattgtgaaacatatctgcactgatcaacaaagtgatgtaactcttctctagcctctgcctacaggggcattttcacatatccctgaactgatgacaaaggtgatgtaacccttgcctgggcattgcctacaggggatattgtgacataagtctgcactgatcacccagg

SEQ ID NO: 7522 - DNA, 159 bp, Protomyxzoa rheumatica
cttgaaaatcatacaaaaaactgtttcaaaactgctctatcaaaagaacggttccactctctgagctgaatgcacacatcacaaagcagtttatgagaatgcttcggcctagtgtttatgtgaagatattcctttttccaccataggcaacaaagcact

SEQ ID NO: 7523 - DNA, 131 bp, Protomyxzoa rheumatica
tgtatttggtttattttgatattttatgtacagtatatatgtatttggtgaactttgatattttatgtacactatataatatgaatttcttgtatttgacattttatgtacagtatataataagtatttgt

SEQ ID NO: 7524 - DNA, 269 bp, Protomyxzoa rheumatica
cataaatcccactgtaggcaaagcctagacaagttttacatcacctcagcaatcagtgcagaggtatgtaccaatgtccctctaggcagagctatgacaggagtcacatctcctgggtgatcagcgcagagataagtcacaatgcccgtgtaggcagagcctagacaagagttgcataacctggatgatccgtgcagagtgatttcacaacgccctctgtaggcagagcctagaaaaatgttacatcacctgggtgatcagtgcagaga

SEQ ID NO: 7525 - DNA, 148 bp, Protomyxzoa rheumatica
cactttattccattccttttgattccattctattctattacattccattcgagtccattccatttgactctattccatttgattccaatccatacgagtctatttcattggagacggttccattccagtccatccatttcgagtccat

SEQ ID NO: 7526 - DNA, 155 bp, Protomyxzoa rheumatica
gtgaacatatttccttttccatcataggcctcaaatcgctccaagtatccacttgcagatactacaaaaagactgtttcagaactgctttctccaaagaaagtttcaactctgttagttgaatgcacacatcacagagcagtttctgagaatgct

SEQ ID NO: 7527 - DNA, 128 bp, Protomyxzoa rheumatica
agtgcaatagaatgcagtggaatggaatggaatggaatggaaaatacccgaatcgaatggaatgtaatggagtgtaagggaattaaaaacaatcactccgaatgtaatggaatggaatggaacggaac

SEQ ID NO: 7528 - DNA, 92 bp, Protomyxzoa rheumatica
ttggttactttcatattttatgtacagtatataatacataatgtgggcactgtgatattttatgtacagtatataatacatactttgggtac

SEQ ID NO: 7529 - DNA, 81 bp, Protomyxzoa rheumatica
cttcatcctgcatccttacatggtggaaggcaaaagagtgtcagtgaatgaatgcactcccagtccattcgagagggaaga

SEQ ID NO: 7530 - DNA, 171 bp, Protomyxzoa rheumatica
acaagagttgcatcaccttggtgatcagtgcagagatatgtctcaaagccccctgtcggcgaagccttaagaagagttacatcatctcggtgatcagtgaagtgatatggtaaaatgcccctgtaggcagagcttagacaagaggtacatcacctgggtcatcagtgcaga

SEQ ID NO: 7531 - DNA, 149 bp, Protomyxzoa rheumatica
aagtcagcacttttcaacaacatataatatctcataatttgtgtggaccagaatctggacacagttcagctggctacctctgccttcaggtcttttatgagactgggggctgtggtcttaactgaagctggactgggaaagcatgagcc

SEQ ID NO: 7532 - DNA, 125 bp, Protomyxzoa rheumatica
gtttttatacgaagatagccttttctaccattggcctcaaagctcttgaaatctccacctgaaaattcggcaaaaagagggtttccaatctgctctgtctaaaggaaggttcaactctctgagtt

SEQ ID NO: 7533 - DNA, 177 bp, Protomyxzoa rheumatica
tgcaaaaagtatgtcagacactttctttgtagtttttatgtgaagatattttcttttccacaataggtctcaaagctctccaaagatccacttgaagattctacaaaagagttttgcaaaactgctcaatcaaaagaaagtttcaactctgtcagatgaatgcacacatgacaagat

SEQ ID NO: 7534 - DNA, 157 bp, Protomyxzoa rheumatica
actcagagaactgaatggattttttgattgaacagttttgaaactctctttttgtaggatctggaagtgggtatgtggagccgattgtggcctatggtggaaaaggaaatatgttcacataaaacctacgcagaagcattctgagaaacttctttgt

SEQ ID NO: 7535 - DNA, 155 bp, Protomyxzoa rheumatica
ctatgggtactttgatatattatgtacagtatataatatatattttgggtacttagatattttatgtagagtatataagatatatttggggtagttttatattttatgtacagtacataatatacatttggtgtactttgatattttatgtacag

SEQ ID NO: 7536 - DNA, 153 bp, Protomyxzoa rheumatica
tcttgaatggaatggaatcgaatggaatgcattacaatcgaagggactcaaatggaatggacaggaatggaatggtcttgaatggaatggactctaatggaatggaatggaaagaatggcatggaatagaatggaatggaatggaatcgaatg

SEQ ID NO: 7537 - DNA, 133 bp, Protomyxzoa rheumatica
ggacctctttgaggctttcgttggaaacgggatttcttcacataattctagacagaagaattctaagtaacttcttatgggttgtgtgtattcaactcagagagttgaaccttcctttagacagagcagattg

SEQ ID NO: 7538 - DNA, 123 bp, Protomyxzoa rheumatica
tagacaagagtccaatcacctgtgtgatcagtgcagagttatgtcacaatgccccatcttgacagagcctagagaagggttacatcacctcggtgatcagtgcagagatgtgtcacaagcccc

SEQ ID NO: 7539 - DNA, 142 bp, Protomyxzoa rheumatica
cagattccacaaaaacagtgtttcaaaactgctctatcaaaagaaaggttcaaatctgtaagttgaatgcagacataacaaagaagttgcagagaatgcttctgtctagtttttatgtgtagatattcccctttccaacgaa

SEQ ID NO: 7540 - DNA, 164 bp, Protomyxzoa rheumatica
tccttttttaccataggcctcaaagcgctctaaatatccacttgcaaattctacaaaaagagatattcaaaactgctctgtcaaaaggaaggttcacctctgtgagttgagtacagacatcacaaagaattttcagagaatacttctgtctactttttatgtgg

SEQ ID NO: 7541 - DNA, 143 bp, Protomyxzoa rheumatica
ggaatggaacggaatggaatggaatggaatgaaatggtgaaaagaaatgtgtgctgagactgtgcaaatgcactacagcccgtgtgacagagggagatcctgtcgaaagaaaggcgtggaatggaagggattggaatggaatg

SEQ ID NO: 7542 - DNA, 433 bp, Protomyxzoa rheumatica
gaatggagcggaatggaatgggacggagtggagaggagtggagcgcagtagagtgaataggagtggaatggagtggaatggaaacgaatgtaatggaatgtagtggagtggagtggaacggagtgggatggaattgaattgaattgaatggaatggaatagaatggaatgcactggaatgcaatggaatagaatgcaatgaaatggaaagttgtcatgtaatgtgagcagagactgtgccactgctctccagcctgagtgacagtgatatagtgtcgaaagaaaggaatggaatgcaatggagtgaaatggaatggaatgaaaaggagagcagtgaagtggagtggagtggagcggagtggagtggagtggactgcaatggaatggaatggagtggagtggaatggaatggtaaggaatggattggaatggag

SEQ ID NO: 7543 - DNA, 126 bp, Protomyxzoa rheumatica
aattctcagtaacttccttgtgttgtgtgcattcaactcagagagttgaacgatcctttacacagagcagattggacacactctttttgtggaattgcaagtggagatttcagccgctttgaggtc

SEQ ID NO: 7544 - DNA, 125 bp, Protomyxzoa rheumatica
actctgtgagttgaatacacacaacacaaagaatgtactgagaattcttctgtctagcattacgtgaagaaatcctttttccaacgaaggactcatggaggtccaaatatccaattgcagacttt

SEQ ID NO: 7545 - DNA, 225 bp, Protomyxzoa rheumatica
catagtgacatatctctgcactgatcactcatgtgatgtaacgcttgtctaagctgcgtgcaaagggggttgtgacagatatctccactgatcacccaggtgatgtaacaattttctgggatttgtctacagggggctttgtgctatatctttgcactgatcacccaggagacgtaactcttgtctaggcctggcctacaggggctttgtgacatatttctgcac

SEQ ID NO: 7546 - DNA, 185 bp, Protomyxzoa rheumatica
actgtacataaaatatcaaagtacccaaagtatgtattatctattgtacataatatatcaaagtacccatagtatttattatacactgtagataaaatatctaagtacccaaagtatgtatcatatactatacttaaaatatcaaactacccaaactatatattttatactatatataaaatatc

SEQ ID NO: 7547 - DNA, 122 bp, Protomyxzoa rheumatica
tcttcatatagaacttgacagaagaattttcagaaacttctttgtgatatgtgcattcaattcacatagttgaactttcccttcgatagagcagttttgaaatactctttttgtggaatttt

SEQ ID NO: 7548 - DNA, 128 bp, Protomyxzoa rheumatica
aggcctatggtggaaaaggaaatatcttcacataaaaacaacgcggaagcattctgagaaacttctttttgatgtctgcattcatctcacagagttgaacctttcttttgattgagcagttttgaaac

SEQ ID NO: 7549 - DNA, 143 bp, Protomyxzoa rheumatica
ctttgcatagagcagtttggaaagacttagtttgtgcagtgtgcaagtgggtatttggaacgctttgaggccttcgttggaaacgggatttcttcatgtaatgccagacagaagaactctcagtgaattctttctgtgtgtgt

SEQ ID NO: 7550 - DNA, 375 bp, Protomyxzoa rheumatica
ccattccattccattccattccattccatcccatcccattcctttccatcccattccattgcactacattccattccattcctttcctttgacaggatctcactgtgtcaaaaaaggctgtaatacagtggcacaatctcagctcacatttctttcaccattcaattgcattccattccatttcatttcattccattacactccactcatttccactccactctactcccctcttttccattccattccattccattccaatccattccataccataccattccactccattccactccactccaataaactccactccactccactgcactcctttccattccatcccattccatttcactccattcctctcca

SEQ ID NO: 7551 - DNA, 125 bp, Protomyxzoa rheumatica
aaaactagacagaagtattctcagaaacttctaagtggtgtgtgcattcaactcacagacgtacacctttctattcatagagcagttttgaatcactctttttgtagaatctgcaagtggacatt

SEQ ID NO: 7552 - DNA, 204 bp, Protomyxzoa rheumatica
tttcatcccattccattccactccattccactccactccaatacactccactccagtccataccactggactccattccattccattcctttctttcaacaggatctgactctgtcacccaggctggagcaaagtggcacaatctcagctcacatttcatttccccattccattccattccattccactccactccattccact

SEQ ID NO: 7553 - DNA, 129 bp, Protomyxzoa rheumatica
gctttttgcagaatctgcaagtggatatttggaaagctttgtggatttcgttggaaacgggagtaccttcatagaaaacctagacagaaacattctaagaaactgctttttgatatctgcattcacgtc

SEQ ID NO: 7554 - DNA, 277 bp, Protomyxzoa rheumatica
aagaactcgaatgtaatggaatggacttgaagggaatggaagggacacagagtgtagccgaatggatttgaatggaatggaatggaatgaattcgaagggaatggaatggaacggaatgaaatggactcgaatggaatggcatggaatggagtcgatggaatggaatggaatgtaatggaatggcataaaatggaatggaatggaatcgaatgtaatgcagttgaatagaatgtacctgaaaggaatggagtggactggaatggaatgaaatggact

SEQ ID NO: 7555 - DNA, 129 bp, Protomyxzoa rheumatica
acagagttgaaattttctttttatttaccagttttgaaacactctttttgtacagtctgcaagtggattattgaagtgctttgaggcctatggtggaaaataaaatattttcacaataaaattagacag

SEQ ID NO: 7556 - DNA, 229 bp, Protomyxzoa rheumatica
aaagcattccatacatctacttgcagattctacgaaaagagtgtttccaaactgctcaatcaaaagaaaggttcaactttgtgagatgaaaacacacatcacaaggaagtttctcagaatgcttccatgcagtttttttgttaagatatttctttttccaccatgggtctcaagggctccaaatatccccttgcagattctacaaaaagagagtttcaaaactgctcta

SEQ ID NO: 7557 - DNA, 307 bp, Protomyxzoa rheumatica
acattgcaatccaatacattcgagtccattctattccagtccatttcattcctgtccattccattcgattctattccatttgattccattccatacatttgcattccattcgattccattctgttcaaataaattccattcgagaccattctttttgagtccaatctatttaagtccattccattcgagtccattatatttgggtacattccattccattccattccattgcattccatttcactcgatgtcattccattcgattctattccattcttctctattccattctattttgttcaatttg

SEQ ID NO: 7558 - DNA, 133 bp, Protomyxzoa rheumatica
ttttcatagaggagttctgaaacactcttttcatagaatcctcaagcggatatttggacggctttgaggccttggttggaaacgggaatatcttcacatataagctagagagaagcattctcagaaacttctt

SEQ ID NO: 7559 - DNA, 260 bp, Protomyxzoa rheumatica
agagacacgtcacaataccccctgtaggtggagcctagacaacagttacatctcctgggtgatcagtgcagagatatgtcacaatactccctgtaggtggagcctagacaagagctacatcacctgggtgatcagtgcagaaatatgtcacaatgaaccctgtaggcagagcatagagaagagttgcatcacatgggtgatcagggcagagatatgtcagaatgtcccctgtaggcagagcatagagaagagttgcatca

SEQ ID NO: 7560 - DNA, 164 bp, Protomyxzoa rheumatica
tacattcatagaaaaactaggcagaatatttctcagaaagtacaatatgatgtgtgtgttcaactcaaagagtgtaacttttcttttgatagagcagatttgaaacaatctttttgaagaaactgcaagtggatatttggagcgctttgaggcctatggtggga

SEQ ID NO: 7561 - DNA, 215 bp, Protomyxzoa rheumatica
gagaatgcttctgtctagtttgtatgtgaagatattccatttacaatgaattcctcaaagagctccaaatatccacaaggagattctacaaaagcagtgttttaaaactgctctatcaatagaaaggttcaactctgttaattgaacacacacatcctaaggagtttctgagaaaccttctgtctagtttttatttgaagatatttctttttcca

SEQ ID NO: 7562 - DNA, 127 bp, Protomyxzoa rheumatica
tccattccattgcattccattccattcctttccattccattaaactccactaggtttgattccattccattccattcgattccaatgcactcgggttgatttctttccattctgttccattccattc

SEQ ID NO: 7563 - DNA, 149 bp, Protomyxzoa rheumatica
ggaaaagcaattatcttcaaataaaaactgcacagaagcattcagagaaacttctttgagatgaatgcattcatgacacagagttgaaactttgttttgatttaggagttttgagacaatctttccgtagaatcttgaagtgaatattt

SEQ ID NO: 7564 - DNA, 179 bp, Protomyxzoa rheumatica
cagaccctcctgtcagggttttggaatcctatgtgagggacaaacattcagaccccagtagcagtgttctacaatcctgtttgagggacaaacactcagactgcagcaggaatgttttggaatcctatgtgagggagaaacattcagaccacagaaggattgttctggaatcccatgtg

SEQ ID NO: 7565 - DNA, 207 bp, Protomyxzoa rheumatica
gtgtagtttttatgtgaagatatttgcttttccacaatagacctcaaatcgttctaaatatccactagcaggctctacaaaaagagtgtttccaaattgctcaatcacaaggtagcttcaaccctgagagttgaatgcacacaacataaagaagtttctcagaatgattctgtgtagttttactttgaagatatttcattttccaaa

SEQ ID NO: 7566 - DNA, 290 bp, Protomyxzoa rheumatica
gtgttctggaatcctatctgagggaagaacattcagacccacgtaacagtgttctggaatcctacgtgagggacaaacactcaaaacagcagtgttctggaatcctaagagagggacatacattcagtccacagcagtagtgttgtggaatcctatgtgagggacaaaaattcagacgacagcagcagtgatctcaaataatatgtgaggaacaaacttttagaccacagcaggagtgatctgaaacccatgtgaggaacaaacatttagaccacagcaggagtgttgtg

SEQ ID NO: 7567 - DNA, 211 bp, Protomyxzoa rheumatica
ttgcagattctacaaaaagagagtttcaaaattgctcaatcaaaagtaagttttaactctgtgaggtgaatgcacacataacaaagaagtttatcagattgcttctgtatagattttatttgaacatgtttcctcttctaccctaaagcactccaaatgtccacttgcaggttctacaaaaagagtgtttccaaaatgctcaatcaaaaga

SEQ ID NO: 7568 - DNA, 629 bp, Protomyxzoa rheumatica
acagagttgaacctttcttttgattgagcagttttgaaacgctctatttgtggtatctgcaagtggatatttggaacgctttgaggcctatagtggaaaaggaaatatcttcacataaaaaactagaaagaagaattctgagaaacttcctaggaaggtgtattttcgtctcacactgttaaacccgtcttttgattgagcagcttcgatacagtcatttagtagaatatgaaagggaatatttgagagcccattgaggcctctggggaaataagaaatatcttcacctaaaaactagacaaaaactttctgagaaacacccttgtgatgtgtgcattcatcatacacagttgaactttcttttgattgagcagtttggatacagtcatttgtattatctgtaaatggatatttggagtgtactgaggcctatggtgaaaaaggaaatatcctcacataaaattcagatggaagcattcttagaaactcctttgtgatgtgtgcattcatctcacagacttcaaactttctattgattgagcagttttgaaacactctttttgtagaatctgccagtggatatttggagcgctctgtggcccatagtggaaaaggaaatatcttcataa

SEQ ID NO: 7569 - DNA, 156 bp, Protomyxzoa rheumatica
gagaccatttctttcgagtccattccattcgagtccattacatttgggtctattccgttccgttccattccattccaatccattcaatgtcattccatgtgattctattccattagactccattccatttcattccattccatccgattccattcc

SEQ ID NO: 7570 - DNA, 157 bp, Protomyxzoa rheumatica
atggagtggaatcaaatggaatggaatcaaatggaatgtaatcgagtggaatggaaccgattggaatggactggaatggaatggactcgaatggaatggaccggaaaaaaaggaattgaacggattggaatcgaacagaacgaaatttaatggaatg

SEQ ID NO: 7571 - DNA, 129 bp, Protomyxzoa rheumatica
atggaatggaatcatcgaatggacaccaatggaaccatcatcgaatggaattgaatggaatattcgaatggacacaaatggaatcatcatcgattgcaatcgaatggaatcatcatcaaatggaattga

SEQ ID NO: 7572 - DNA, 132 bp, Protomyxzoa rheumatica
catgtatattctgacacatatctgaactgatcaaccaagtgatgaaacacttgtctagtctctgccttcaggggctttgtgacacatctcttcactgataaccctggggagggaactcttgtctacactctg

SEQ ID NO: 7573 - DNA, 203 bp, Protomyxzoa rheumatica
cacacatcacaaagaagttactcagaatgcctctgcatagtttttatgtgaaaatatttacttttccacagtaggcatcaaagcgctcaaaatatcctcttgcagatttttcaaaaactgtgtttcaaaactgctctaccaaaagaaaggttcaacactgtgagatgaatgcacacatcacaaagaacattttcagaaggctt

SEQ ID NO: 7574 - DNA, 122 bp, Protomyxzoa rheumatica
ggaccaagagcaggagatccctaatccgtcaccaaggcgatagggcatcaaaattgcagggtgagggcacaatccacattctgaggtcaaactgctgccaggaagacagaagtgcttttaca

SEQ ID NO: 7575 - DNA, 266 bp, Protomyxzoa rheumatica
atgcaatggaatggaatcaacccgagtacaatggaacggaatagaatggaatgtaatgttatcgaatggaatggaatggaatggaatggaatcaacacgagtgcaatggaaaggaatggaatggaatggaaaggaatgtaatggaatggagtcaacccaagtggaatggaaagcaatggtatggaatggaatggaatggaaagggatggaatggagtgaacccaacgggaatggaatggaatggaatgaaatggaatggaatggaa

SEQ ID NO: 7576 - DNA, 285 bp, Protomyxzoa rheumatica
tagcttttatgggaagattatcccttttccatcgaaatctccaaagaggtccaaatatccgcttgcaggtcccactgaaagagtgtttccaaactgctgtatcaaaaggaaccttcaactccgtgagttgaatgccatcatcacaaagacgtttctgacaatgcttctctctggttttgaggtgaagatatttccttttccaccacaggcctgaaagcgctccaaacgtccacttgcagattctgccaaaagagagtttcaacactgctctatccataggagggt

SEQ ID NO: 7577 - DNA, 187 bp, Protomyxzoa rheumatica
cctatggtagaaaagggaatatcttcacataaaacccagaccgaagcattctcagaaacttctttgtgatgtttgtattcaactcacagaatttaacataccttttcatagaccagttttgaaacactcttttcttaatactacaagtggatatttggactactttgaggccttcattggaaacggg

SEQ ID NO: 7578 - DNA, 155 bp, Protomyxzoa rheumatica
atatcttcacataaaaactacacagaagcattctgagaaagtttttgtgatgtgtgcattcatctcacggagttgagcctatcttttgattgggcagttttgaaactctctttttgaagaatctggaatgagtatttggaggcctttgtggcata

SEQ ID NO: 7579 - DNA, 181 bp, Protomyxzoa rheumatica
gaatttgcaagtggagatttcaagcgatttgaggccaatctttgaaatggaaatctcttcgtgtaaaaactacacagaatcattctcagaaactgctttgtgatgtctgcgttcagcttacagagtttcacctttctttttatagagcagtttggaaagactctgtctgtaaagtctgcaa

SEQ ID NO: 7580 - DNA, 375 bp, Protomyxzoa rheumatica
aaactagacagaagcattctcacaaactggtttgtgatgtgagtcctcagctaacagagttgaacctttctatttacagagctgttttgaaagactctattggagaatctgcaagtggatatttggaaagctttaaggatttcattggaaaccggaatatcttcaggtaaaatctcgacaagggcattctcagaaacttctttgtgatgtgtgtcctcaagtaacagagtacaacctgtcttttggtacagcagtttggaaacactctttctgtagaatctacaagtggatatttggatagctcaagctatttcgttggaaacgggaatagcttcatataaactctagacagaagcactctcagaaactactttg

SEQ ID NO: 7581 - DNA, 134 bp, Protomyxzoa rheumatica
aaacctcattacaggagttatgctttagcactaagtgactatttatactgcaaaatgctaaaagtgtttacttccaggttggcagtaaaaaaaccttttcactacatcatctctgtgaccaatgcagtcagtgt

SEQ ID NO: 7582 - DNA, 260 bp, Protomyxzoa rheumatica
gattctgagaaattcctttgtgatgtgtgcattcatctcacagagttgaaccttactttcaattaagcagttttgaaacactcttttttgtagaatctgcaagcggatatttgctgcactttgaggcctatggtggttaatgaaatatcttcatataataactagacagaagcattatgacaaacttctttatgatgtgtgcattcgtctcacagagtggaacctttcttttgattgagcagctctcaaacactcttttt

SEQ ID NO: 7583 - DNA, 130 bp, Protomyxzoa rheumatica
tctattccattcgatgatcattccatttgacacttttcaatgattccatgggattctattaaatgatgattcaattcgagcccattcgatgattccattcaattccatttgatgaagattccattcgatt

SEQ ID NO: 7584 - DNA, 193 bp, Protomyxzoa rheumatica
agaaggttctgagaattcttctgtcaagttttatgtgaagaaaccccgtttccaacgaaggcctcttaaaagtccaaatattcacttgcagatactacaaaaacactgtttcaaaagtgctctatcaaaagaaagtttaaactgtttgagttgaacgcacacttcacaaagtagtttctgagaatcgttatgt

SEQ ID NO: 7585 - DNA, 403 bp, Protomyxzoa rheumatica
tggaatgcaatggaataaaatgaaatggaatggtgaaatgaaatgtgagcctagttagtgccactgcatgccagcctgggtaacagagtgagatgctgtcaaaagaaaggaatggaatggaattcactggagtggagcagagtggagtggagtggtgtgtagtggaatggagtggattggaatgccatgcagtggattgcaatggagtgcagtggagtcaagtggactggagtggaattgagtggaatggaatgggaaggaatggaatggagtggagtggagggaatggagttcactggaatggaatggagtggaatggaatggaatgcaatggagtggattggatttcagtggagtggagtggagtggactggaatggaatggaatggaatggaatggaatg

SEQ ID NO: 7586 - DNA, 138 bp, Protomyxzoa rheumatica
ggtactttgatattttatgtacagtatacaatatatagtttgagtagtttgatattttatgtactgtataaaatatatagttttggtactttggtattttatgtatagtatatagtttgagtactttgatattttatg

SEQ ID NO: 7587 - DNA, 172 bp, Protomyxzoa rheumatica
caaagtgctcacaaatatccttttgcagattctacaaaaagaatgttaccaaactgctcaaacaaaagaatggttcacatctgtgagatgaatgcacacatcacagaaaactttctcagaaagcttctgtctacattttatgtgaagatcggagtgcagtggaatggaatgg

SEQ ID NO: 7588 - DNA, 123 bp, Protomyxzoa rheumatica
tatagaatggaatcgttgaatggaatcaaatggaatcatcaaatggaatcgaatggcatcatcattgaatggaattgaatggaatcagcaaatggaaacgaatggaatcatcatcgaatggaa

SEQ ID NO: 7589 - DNA, 207 bp, Protomyxzoa rheumatica
ttatgtgaagatatttccttttccacaataggcctcaaagtgctcgaaacattgacttgcacattctacaaaatgagtgtttcaaaactgcttaatcaaaagaaaggttcagctttgtgagatgaatacacacaacacaaagaagtttctcagaattattttgtgtggtttttatgtgaagatatttcctttttcacacttggccac

SEQ ID NO: 7590 - DNA, 228 bp, Protomyxzoa rheumatica
tccatcacctgggtgatcaatgcagagatatgtcccaaatccccctctaggcagagtataggcagagcctggacaagcgttacatcacctcggtgatcaatgcggtgattgtcactatgcctcgtaggcggagcctagtctagcgttacatcaccttggtgatcagtgcagacatatgtcacaaagcacccatacacagagcctagataagagtcccatcacttgggt

SEQ ID NO: 7591 - DNA, 162 bp, Protomyxzoa rheumatica
caaactatatattatagactgtacataaaatatgaaagtacccaaattttatattataaactgtacataaagtatcaaagtacccaaactttatattatatactgtagataaaatatagaagtacaccaaatatatattatatactgtacataaaatatcaa

SEQ ID NO: 7592 - DNA, 250 bp, Protomyxzoa rheumatica
gctctgaggatttcgttggagacgggatgacatataaaaagtagacagcagcattctcagaagcgtctttgtgatgtttgcttttaagtcacagagttgaattttcccttccatagagcaggtttgaaacaatctttctgtagtatctggaagtgaacaattggacagctttcaggtctatggtgagaaaggcaatatcttcaaataaatactagacagaagcattctcatcaacttgtttgtgatgtgt

SEQ ID NO: 7593 - DNA, 175 bp, Protomyxzoa rheumatica
agggatgtgtgaaaacacccctgtaggcagagtctagacaagagttacatcacgtagttgatcagtgcagaggtatttcacaataacccctgtaggcagatcctcgagaagagttgaatcacctgggtgatcagagcagagatatttcacaatgccccctttgggcagaaggtag

SEQ ID NO: 7594 - DNA, 119 bp, Protomyxzoa rheumatica
ctcagaaactgctttgtgatgtgtgtgttcaattcacagggttgactctttcttttgattgagcagttttgaaccacctgttttgtagaatctgcttgtggatatttgtagctcttgga

SEQ ID NO: 7595 - DNA, 144 bp, Protomyxzoa rheumatica
tgagtggaataaaaaggaatcatcgaatgcacttgaatggaatcatcaaatggactctaatggaatcttcatcaaatagaatcgaatggaatcattgaatggattcgaatggaatcatcatcaaatggaatcaaatggaatcat

SEQ ID NO: 7596 - DNA, 155 bp, Protomyxzoa rheumatica
cgaatggactcgaatggaatcatcatcgaatataattgaaataatcatcaaatggattcgaatggaaacatcgaatggactcaaatggaatcatcattgaatgcaatcaaatggaatcattgaatggactcgaatgcaatggtcttcgaatggaa

SEQ ID NO: 7597 - DNA, 152 bp, Protomyxzoa rheumatica
cccttcttttgattgagcagtttggaaacactcttttttgtagaatctgcaagtggacatttggaacgctttgcttcctctggtaaaaaaggaaatatcttcacctaaattgtagacagaagcaatctgagaaacttctttgtgatgtgtgc

SEQ ID NO: 7598 - DNA, 366 bp, Protomyxzoa rheumatica
gaatggagtggaatggaatgggatggaatggaatggagtgcagtggagtgaagtggagtggagtggagtggaatggaatcgaatggaatttaaaagaatggaatggaatgaaaaggaatggaatgctatggtgaaatgaaatgtgagctgagactgtcccactgtactccatcctgggtgacagagtgagatcctgtcttaagaaaggaaaggaatggaatggattggaaaataatggagaggaatggaatgtagtggagtgagtgcagtggagtggagtggagggaaatggagtggaatagaatggaatggaatggaatgaagtggagtggagtctagtggagtgcagtgaagtggaatggagtg

SEQ ID NO: 7599 - DNA, 175 bp, Protomyxzoa rheumatica
gagttacatcacctgggtgatcagtgcagaaaaatgtcacaaagcctccttaggcagagcctagaaaaaagccccaacacctgggtgatcagtgcagagttatgtcacaaagtccttttaggcagatcctagacaattgttacataacttggatgatcagtgcagagatatgtca

SEQ ID NO: 7600 - DNA, 187 bp, Protomyxzoa rheumatica
aatggaatggaatggaatggaatagtgaaatgaaatgtgagctaagattctgcaactgcactacagtctgggtgacaaagtttgatccagtcaaaataaaggaatggaaaggtatggagtaaaatgaaatggaatgggttggagtgaaatggaatggagtggaatggagtggagtggagtggaatgg

SEQ ID NO: 7601 - DNA, 187 bp, Protomyxzoa rheumatica
agggtctgaatgtttgtcccacacataggattccagaacattcccgctgttgtcgaaatgtttgttcctcacataggatttcagaacactcctgctgtggtccgaatggttgaacctcatataggattccagaacactccttctgtggtctgggtgtttgtgccttacatgggattccagaacaatt

SEQ ID NO: 7602 - DNA, 237 bp, Protomyxzoa rheumatica
atcgaatggaatcgaatggaatcatcaaatgggatagaatgtaatcatcataaaatgtaatcaaatggaatcatcacatggaatcgaatggaatcatcattgaatggaatcgaatagaaccatcgaatggaatcaaatggaatcaacatcgaatggaatcgaatggaatcatagaacagtatcgaatggaataatcattgaatggaattgaaagcaattattgaatggactcaaata

SEQ ID NO: 7603 - DNA, 210 bp, Protomyxzoa rheumatica
gagttgaatattccctttcttagagcaggtttgaaaccgtcttttcttggaatctgcaggtggatatttggatagctttcaggatttcgttggaaacgggattacatatacaaagtagacagtagcattctcagaagcttctctgtgatgtttgcttttaagtcacagagttgagcattccctttcatagagcaggtttgaaacactctt

SEQ ID NO: 7604 - DNA, 131 bp, Protomyxzoa rheumatica
tcagaaacttatttgtgatgtctgcattcaactcacagaggtgagccttccatttgatagagcagttttgatacactctttttgtagaatttgcaaatggatatttagagcgctttggggcctatggtgga

SEQ ID NO: 7605 - DNA, 152 bp, Protomyxzoa rheumatica
tcacagagttgaaccgttcttttgatagagcagttttgattcactctttttgtggaaactgcaagtggacatttgtagcgttttgaggcctatggtgaaaaacgaaataccttcacataaaaacaacacagaagcattctgaggaactgctt

SEQ ID NO: 7606 - DNA, 81 bp, Protomyxzoa rheumatica
aaattgtatgtatctctactaattaatgtacttgtgggtatatcttcagtggcatatttgttgtcccttattgaggcatga

SEQ ID NO: 7607 - DNA, 149 bp, Protomyxzoa rheumatica
attttctcggatttgcctacaggggactttgtgacatatctttgcactgatcccccaggagatgtaactcttttctaggctctgcctgcaggggatttgtgacatatttctgcactgatcacccaggtgatataactcttttttaggct

SEQ ID NO: 7608 - DNA, 114 bp, Protomyxzoa rheumatica
ttcaccataggcctcaagcagctaagaaatttccctctgcagcttctaccaaagactgtttccaaactgctcaactgaaagaaaggttgaattctgtgacatgaattcacacat

SEQ ID NO: 7609 - DNA, 144 bp, Protomyxzoa rheumatica
cctatcttatgattgagcagttttgaaacactctttttgtggaatcttcaattggatatttggagtgcttagatgcctgtgttggaaaaggaaatatcttcacataaaaactagtaagagtcattctgagaaagttctttgtga

SEQ ID NO: 7610 - DNA, 205 bp, Protomyxzoa rheumatica
ttctttcgacaggatctcactctgtcacccaggctggagtatggtggcactatctcagttcacatttcatttcaccattgcattccattccattgcattccattccattccaatccattcaattccattccatccaattccattccactcctgtgaactccactccactccaattcattccattccattccattccatttcattc

SEQ ID NO: 7611 - DNA, 370 bp, Protomyxzoa rheumatica
ttctcagaatgcttctgtctagtttttatgtgaagatatttccttttccaaaacaggcctcaaatttctcccaatatccacttgcagattctcaaaaagaatgtttcaaaactgctcaatcataagaaaatttcaactctgtcacgtgaatgcacacatgtcaaaggagttgctcagaatgcttctgtctagtttttatgtgaagatattttcttttccactttaggcagtatagcactccaaatatccacttgcagattccacaaatagagtgtttccaaactgctgaatcaaaagaaagtttcgagtctgtgagatgagtgcacacatcataaagaagtttctcagaatgcttctgtctagtttttat

SEQ ID NO: 7612 - DNA, 325 bp, Protomyxzoa rheumatica
aaatttcgttggaatgggtgctttcaactcacagagttgaatatgtcttttgattgagcagtttggaatctctctttctgcagaatctgcaagtggatatttggagccctttgcggcctatagtggaaaaggaaataccttcacataaaaactacaaaagagatttctgaggaacgtcttggtcatgtgtgccttcatctcacagagttgatcctttcttttgattgagcagtttggaagcactctttttgtagtatctacaagtggatgtttgtatcactttgtggcctatggtggaaaaggaaatatcttcacatgagaacta

SEQ ID NO: 7613 - DNA, 163 bp, Protomyxzoa rheumatica
taacccttggcaaatttctgcttacaggggtattgtgaaataactctgcactgatcaactaggggatgtaactcttgtctaggctctccctacatgggtgttttcacatatccctgaactgatgagaaagatgatgtaactcttgcctaggctttgcctacag

SEQ ID NO: 7614 - DNA, 199 bp, Protomyxzoa rheumatica
acatcgaatggaatggaatggagtcatcatggaaaggaatcgaagggaatcatcaaatagaatcaaactgaatcattgaatggaatcgaatggaatcatcatcaaatggacttgaatgcaattatcatcaaaaggaatcaaatggaatcatcgaatggactcgaatggaataatcgaatggacttcaatggaatcatca

SEQ ID NO: 7615 - DNA, 123 bp, Protomyxzoa rheumatica
tggaatggaatggaatcgaatggaatggaattgaatagaaccgaaaggaatagaaaggaatggagtgtaaaggaaagatatcgaatcaaaaggaatggaatggaatggaatcgaatggagtgg

SEQ ID NO: 7616 - DNA, 193 bp, Protomyxzoa rheumatica
tggaatggaatggaatggtatggacccaaatgtagtggaatcgaatggaatgggctcaaatataatggactcgaaagaaatggtctcgaatgtaatttatacgaatggaatggaattgaatggaatgcaatagtatggaatcgaaccgaatggaatggaattgaatggaatcgaaaggaatagaatggaatgg

SEQ ID NO: 7617 - DNA, 202 bp, Protomyxzoa rheumatica
gtggatatttggagacgtttgtggcctatggtagaaaaggcaatatcttcaaataaaaactagacagaagcattttgagaaatttctctgtgctgtgtgcattcatatcacatggttgaaactaccttttgtttgagcagttttgaatctctctttttgtatcatctgcaatggatatttggagccctttgtggtctgtggt

SEQ ID NO: 7618 - DNA, 157 bp, Protomyxzoa rheumatica
tttgttgaatctccaagtggatatttgggcctctttgtggtcttcgtttgaaaagtgacttcttcatacaaaactagacagaagaattctcataaacttctttgggatgtgtgcttgcaactcgcagagttgaagcttcctttcgatagagcagtct

SEQ ID NO: 7619 - DNA, 172 bp, Protomyxzoa rheumatica
ggtagaaaaggaaatatcttcatataaaaactcgacagaatcattctcacaaactgctttgtgttgtgtgtgttccacacacggagtttaacctatcttccacagagaagtttggaaacactgagtttgtaaattctgcaagtggatatatggacctccttgaggccttcgt

SEQ ID NO: 7620 - DNA, 122 bp, Protomyxzoa rheumatica
aaggaaatatcttcacataaagctacacagaagtattctgaaaaacttctttgtgaaatgttcgttcaacacactgtggtgaacatttcttttcattgagcagttttgaaaaccactatttg

SEQ ID NO: 7621 - DNA, 122 bp, Protomyxzoa rheumatica
ggcctcaaagcgctccaaatgtccacttgcaggttgtacaaaaagtgtgtttccaaactgctcaattcaaagaaaggttcaactctgtgtgatgaacgcacatatcacaaagaagtttctca

SEQ ID NO: 7622 - DNA, 156 bp, Protomyxzoa rheumatica
actttgagtcctatgatggaaaaagaaatattctcacataaaaactagacagaataattctgagaaacttctttttgatgcgtgtgtttatctcaaagagttgagcctttcttttgattgaggagtttggaaacactttattttgtagaatctgca

SEQ ID NO: 7623 - DNA, 123 bp, Protomyxzoa rheumatica
ttcaattctgtgacttgaatgcaaacatcacaaagtagttcctgagaatgcttctctctagattttacatgtaatcccgcttctaacgaaatcctcaaagccatccgaatatccactttctga

SEQ ID NO: 7624 - DNA, 158 bp, Protomyxzoa rheumatica
ttggagctatatgaatccaattgtggaaaaggaaataccttcacataaaaactagacagaagaattctgaaaaacttctttttagtgtgtgcgttcatctcacagagttgaaccgttgtttgattgagcagtttggaaacactctttttgtagaatct

SEQ ID NO: 7625 - DNA, 280 bp, Protomyxzoa rheumatica
ggatatttggagccttttgcgggctatggaggaaaaggaaatatcttaaaataaaacaaaggcattctgagaaacttctttgcgaggtgttccttcatctcacaaagtttaaactttcttttgattgagcagttttgaaacactctttctgtacaatctgcaagttgatatttggagtgcttagattcctattgtggaaaaggaaatatcttcacataaaaactgcacagaatcattctgaaaaacttctgtgcaatatgtgcattcatctcacagtgtt

SEQ ID NO: 7626 - DNA, 133 bp, Protomyxzoa rheumatica
tatacttaaaacaatattctatgcaaaatgctataatttccccatgcctccaatttggacatgataaaactgggtctcgtaaagttttcaactcagagttctctgcttagtaagaagtagaagtaagtctaat

SEQ ID NO: 7627 - DNA, 192 bp, Protomyxzoa rheumatica
aatgctcacataacaaagaagtttctcacagtatttctgcgtagtttttaagtgaggatattttcttttccaaaatagacctcaaagccctccaaaaatcaacttccagactctgcaaaagcagtgtttcaaaactgctcaatcaaagaaagtgtcaactctgtgagatgaatgtacacatcacaaagaagt

SEQ ID NO: 7628 - DNA, 312 bp, Protomyxzoa rheumatica
aagaaaggttaaactctgagttgaacacacacatcacaatatattttctgagaatgatactgtttagtttttatacgaagatatttccttttctaccattgacctcaaatcgtagaattctccacttgcaaattccaccaaaagggtgtttccaatctgctctgtctaaaggaaggttcaactctgtgagttgaatacacaccacaaaaagaagttactgagaattcttctgtctagcattatatgaaaaatcccgtttccaacgaaggccacaaagaggtccaaatatccacttgcagattctgcaaaaag

SEQ ID NO: 7629 - DNA, 142 bp, Protomyxzoa rheumatica
tgtacagtgtatcgtttgagtactttgatatttaatgtactgtttgttataaatatttgggtgctttcatattttatgtactgtatataatacatgctttaggcactttgatattttatgtacagtatataatacatacttt

SEQ ID NO: 7630 - DNA, 235 bp, Protomyxzoa rheumatica
gaatggaatggaatggaatggaatggaatggagtggaatccacccgagtggaatgcaatggaatggaatgcaatggatttgaaaggaatataatagaattgaatggattcatcccgagtggaatggaatggtatctaatgcaatggattggaatggaacagaacggaatggagaggaaagaatagattgattccatgtggaaatgaatggaatggaatggattggaaagaaatgg

SEQ ID NO: 7631 - DNA, 155 bp, Protomyxzoa rheumatica
tgcaagtgttcatttggagctctttgaggcctatggtggacaaggaaacatcttcacataaaaactaggcagaaacattctcagagacatctttgtaatgtatgcattcacctcacagagttgaagcttccttttgagagagcagtttagaaaca

SEQ ID NO: 7632 - DNA, 132 bp, Protomyxzoa rheumatica
tgtgcattcaacacacagagttgaaacttcctttctatagagcagttttgaaatactctttttgaagaagttccaagtgggtatttagagcggtttgaggtctgtggtagaaaagggtatatcttcatagaa

SEQ ID NO: 7633 - DNA, 358 bp, Protomyxzoa rheumatica
atcttcacataaaaaccagacacaaagattctcagaaacttctttgtgacgtttgcattcaactcacagagttgaacacaccttttcatagagcagttttgaagcagtcttttcgtagaatctgcaagtgtatatttggaatgctttgaggccttcattgtaaacgagaatatcttcacataaaaacgagacagaagcattctcagcaactactttgtgatgattgcattcaactcacagtgttaacctttattttcatagaacagttttgaaacactgtttttgtagcatctgcaagtggtcatttggagagctttgaggcctatggtggaaaaggaaatatcttcacataaaaaca

SEQ ID NO: 7634 - DNA, 165 bp, Protomyxzoa rheumatica
atggtctggatgattgtctcttacataggattccagaacatggcttatgggttctgagtgtttctccctcacataggattacagaacactccttctgtggtctgaatgtttgtcgctcacttaggaatccagaacactgctgttgggttctgagtgtccctcacg

SEQ ID NO: 7635 - DNA, 238 bp, Protomyxzoa rheumatica
tatgtgaagatatttccttctccaccacaggcctcgaagctctgaaaatttccacatgcagattctaaaaaaacagtgcttcaaaacagctctatcaaaagaaaggttcagctctgtgagttgaatgcacacatcacaaagaaggctctgagaatgcttctctctagtttttatgtgaagatattcccgtttacaaagaaggcctcaaagcactccatatatccacttgcagattcta

SEQ ID NO: 7636 - DNA, 135 bp, Protomyxzoa rheumatica
acagatttaaaactttgttttgattgagcagttttcaaactccctttttgtagaaactgcaagtggatatttgcagtgctttgaggactatggtggaaaaggaacataaaaactagacagagaattctgagaaac

SEQ ID NO: 7637 - DNA, 141 bp, Protomyxzoa rheumatica
gcattctgagaaacttctttgtgatgtgtgcattcaactgacagagttgaacctagctttgattaaaccgttttgaatctctttttttgtagaatctgtgagtggatatttggagccctttgtggcctatggtggaaaagg

SEQ ID NO: 7638 - DNA, 249 bp, Protomyxzoa rheumatica
gtccttttgtagaatctgcaaagggatatttctgagcccactgagtcctgtggtgaaaaaggaaatatcttcaaataaaagcaaaacagaagctttctgagaaccttctttgtgatgtgtgcattcatctcacagaatttaaccttacttttgattgagctgttttgaaacactcttgttgtagaatctgcaataggacatttggagcgctttgcgaactatggtggaaaaggaaatatcttcacataa

SEQ ID NO: 7639 - DNA, 132 bp, Protomyxzoa rheumatica
ggacagagggtagacaagagttacatcacctaggtgatcactgcagagatttgtcaaaattccctgtaagcagtgattataaaagtgttacaaaacctaagtgatcagtgcagagatatgtcacaaagctcc

SEQ ID NO: 7640 - DNA, 366 bp, Protomyxzoa rheumatica
tgggactcttctctatattctgcatagagggggatttgtgacatatctgtgcactgatcaccgaggtgatggaagacttttctaggctttgtctatgggggcattgtgtcaaacatctgcactgaacaaccaggtgatgtaactcttttctagcctctgtttacagggacttttgtgacatatcactgtattgatcacctaggtgatgtaagccttgtatgggctttgcctacagaaggctttgtgacatatctctgcactgatctctgacgtgaggcaactcttgtctaggcactgactacatgggacattagtacatatcccttcactgatcacccaggtgatggactcttgtcttagatctgc

SEQ ID NO: 7641 - DNA, 410 bp, Protomyxzoa rheumatica
tttcatagagcagttttgaaactctctttttgtagaatctacaagtggatatttggggccatttgtggcctatggtggaaatgggaatatcttcaactaaaaactgcacagaatcattctgagaaacttcatggtgatgtgtgcattcatctcacagagatgaatctttcttttcatttagcagttttgaaacactctgtataatctgcaagcggatagttggagtgctttgaggcctattgttgaaaagaaaatatcttcaaatgaaatctacacagaagcattctgagaaacctctttgtgatgtgtgcattcatatctcaaagttgaatctttcttttgaaggaccacttttgaaatcctctttttgaagaatctgcaagcagacattttgtgcgccttgaggccta

SEQ ID NO: 7642 - DNA, 161 bp, Protomyxzoa rheumatica
gattatatactgtacataaaatatcaaagtaccccaaatatatattatatactctacatgaaatatcaaacttcagaatctatatattatatactgtagagaaaatattaaagtacccaacgtatatattctatactgtacaaaaaatatcaaagtatgca

SEQ ID NO: 7643 - DNA, 152 bp, Protomyxzoa rheumatica
ttccattccactcaggttgattccgttcgattccattccattccattatagttgattccattgcactacatgccgttccattccgttctactccaatccaatccattccacccgggtttattccattccattccattgcattcgactcgggt

SEQ ID NO: 7644 - DNA, 149 bp, Protomyxzoa rheumatica
tgcaaaattctcaaagaagtttatgagaatgcttctgtctactttttatatgaagatatttcctttccaacataggcctcaaagctctgcaaatgtccacttgcagatcctacaaaatgagtgtttcaaaaccgctcaatcaaaagaaa

SEQ ID NO: 7645 - DNA, 129 bp, Protomyxzoa rheumatica
tctgacaaacttctttgttatgtgtgcattcatctttcagagttgaacctttcttttgattgagcaactttgaaacactgtttttgtagaatctgcaagtagtcatttggagcgcttttgggcctatgg

SEQ ID NO: 7646 - DNA, 126 bp, Protomyxzoa rheumatica
ccagcctcaagtggaaaaggaaatatcttcacataaaaaacggaaagaagcattctgcgaaactttttgtgatgtgtgcattctcctcacagagttgaacttttcttttgattgagcaatttgaaa

SEQ ID NO: 7647 - DNA, 141 bp, Protomyxzoa rheumatica
atcaatgaatagaatcgaatggagtcaccaaatggaatctgttggaatcatcatcgaatagaactgaatgcagtaatcatcgaatggaatcaaatggaatcatcaatgaatagaatcgaatggagtcaccaaatggaatct

SEQ ID NO: 7648 - DNA, 148 bp, Protomyxzoa rheumatica
taactcttgcctaggctttgcctgcaggggacattgtgacatatatctgcactgatcaccgaggtgatgccactcttctctatgctctgcctacagcgggtattgtgacatatatctgcactgatcacccaggtgatgtaactctttt

SEQ ID NO: 7649 - DNA, 179 bp, Protomyxzoa rheumatica
ggcatcaaagcgctccaaatgtccacttccagattctacaaaaagagtgtttcaaacctgctctaagtaagggagttttcaactctgtgactggaatgcagatatcacaaagtagtttctgagactgcttctgtgtatactttagatgaagatattcccgtttccaacgatatcgttag

SEQ ID NO: 7650 - DNA, 230 bp, Protomyxzoa rheumatica
gtttcaaaacttcttaatcaaacgataggttcaactctgggagatgaatccacacgtcacaaagaagtttctcagaatgcctctgtgtatttttcatgtgacgacattttctttaccaccgtaggactcaaaaccctccaaatatccacgtacagattctacaaaaggagtgtttccaaactgcacaatcaaaagaaaagttcaactctttgagatgaatgcacacatca

SEQ ID NO: 7651 - DNA, 173 bp, Protomyxzoa rheumatica
attccattcggatccatttgatgattccaatggattccattcgatgatgattcaattctattccattcaatgatgattccattcaggtccattagatgattccatttgattccattcgacgatgattccattcaggtccattagatgactccatttgattccattcgacgatg

SEQ ID NO: 7652 - DNA, 155 bp, Protomyxzoa rheumatica
gaatcaccatcgaatggaatagaatggaatcactgaatgaagtcgaatggaatcatcatccaatggactcaaatggaattatcatctaatggaatcaaatggaattattgaatggacttgattggaatcattgaatgtacacaaatggaatcatc

SEQ ID NO: 7653 - DNA, 182 bp, Protomyxzoa rheumatica
atatcccaaagaagattctgagattgcttctgtctagtttgtatgggaagatatttcccttttcaccgtaggcgtcaaggcgctccaaatgtccaattccagatactataaaaagagtgtttcaaacctactctgtgaaagagaatattcaactctgtgactggaatgcagatatcacaaag

SEQ ID NO: 7654 - DNA, 132 bp, Protomyxzoa rheumatica
gattctacaaaaagagtgtttcaaagctgctcaatcaaaggaaagattcaactctgtgagatgattgcacatatcacaaagaagtttgtcagaatgcttctgtttagattttacgtgaagatatttcccttt

SEQ ID NO: 7655 - DNA, 150 bp, Protomyxzoa rheumatica
ggaattatcgaatagaatcaaatgtaatcatcaaatgaaattgcattaaatcatggaatggacaggaatggagtcatcatcgaatggaatcgaacggaatcatcgaacagactcgtatggtataatcatcgaatggaatggagaggaatc

SEQ ID NO: 7656 - DNA, 134 bp, Protomyxzoa rheumatica
ctttgtgatgtgtgcattccactcacagagtttaaccttccttttgttagagcagttttgaaacactcttttttttagtatatgaaaatggatttatggagtgctttgaagctctcgttggaaatgggaatatc

SEQ ID NO: 7657 - DNA, 126 bp, Protomyxzoa rheumatica
agtaaaaactagacagaagcattctctgaaacttctttctaatgtttgcattcaattcacagagttgaaactttattttcatagaccagttttgaaacactctttttgtggtatccacaagttgac

SEQ ID NO: 7658 - DNA, 122 bp, Protomyxzoa rheumatica
cagtccattctattcgactccattccattccagtccattctattcgagtccatgacatttaattccattgcatttttttccattcctctcctctccactcctttcaactccaatcctctcct

SEQ ID NO: 7659 - DNA, 138 bp, Protomyxzoa rheumatica
caaggagagcgaaggcaccatgccggtcttccacccttccatgcaagtttccgggtgcccgcagagctccgggaacaaagagtcagcatgacacatctctgaactgatcaaaagtgatgtaactcttgtctaggctct

SEQ ID NO: 7660 - DNA, 178 bp, Protomyxzoa rheumatica
gaatggaatcgaatggaatggaatggaatggagtggactcgaatggaatggaaaggaatggaacggaaacgaatggaacggaatggaatggattggaatagaaagtaatagaatctaatggaatcgtttggaagggaatggaatgcaatggagtcgaatggaatagaattgaatgtaa

SEQ ID NO: 7661 - DNA, 178 bp, Protomyxzoa rheumatica
agtttttatttgaagatatttccttttccaccgtagacgcaaagggctccaaatatccacttgcagattgtacaaaaggagagattcaaaactggtcactcaaaagataggttcagctctgtgagttgaatgcacacgtcaaaaagaagtttcttagagtgcctctatgtagatttta

SEQ ID NO: 7662 - DNA, 158 bp, Protomyxzoa rheumatica
tggcacaatctcagctcacatttcatttaaccattctattccattctattccattccattcaactacactcctctccactccactccattccatttgaatccaatccactcaactcctttccatcccatcccattccattccactccactccattcca

SEQ ID NO: 7663 - DNA, 122 bp, Protomyxzoa rheumatica
cactgtttttgtagaatctgcaagtcttcatttggagggctttgaggcctaaggtggaaaagaaaatatcttcacataaaaagtagacaggagcattctcagaaagacctttgtgatgtgtg

SEQ ID NO: 7664 - DNA, 181 bp, Protomyxzoa rheumatica
gccttcgttagaaacgggatttcttcatactctagacagaagaattctcagtaacttccttgtgttgtgtactttcaactcacagagttgaacgatcctttacacagagcagattagaaacactctttttgtggaacttgcaattggatatttcagccgctttgaggtcaatggtagaaaa

SEQ ID NO: 7665 - DNA, 220 bp, Protomyxzoa rheumatica
ataaaaactagatggaagcattctcagaaacttctttgtaatgtgtgcattcagctcacagagttcatcctttcttttgatacagcagttttgaaacacactttttgcagaatctgcaagttgacatttgaagcaatttgagggctatggtggaaaaagaaatatcttcacataaaaattagacagaagcattctcagcaccttctttgtgatatttgca

SEQ ID NO: 7666 - DNA, 140 bp, Protomyxzoa rheumatica
aatgtaatggaatggaatagtgtggaatggacacaaatataatggactcgaatggaatggactcaaatagaatagacccaaaaggaatggactcgaatgcaatttattcaaatagaatggaatcgaatggaatgcaataa

SEQ ID NO: 7667 - DNA, 191 bp, Protomyxzoa rheumatica
ggaatctgcaattcgatatttggagagctttgaggcctatgttggtaaaggaaatatcttcaaataaaatctggacagaagcattctgagaaactactttgtgatatgtgcattcaactcacaaagttgaacatatctttgaggagtttggaaacattctttttgtagcatctgcaaatgtatatttggag

SEQ ID NO: 7668 - DNA, 141 bp, Protomyxzoa rheumatica
atggttctgtgcagtatttatttgaagatatttccttttccgccatatgctgcaaaggactacaaatatcttcttgcagattctacaaaaagagagattcaaagctgctttttgaaaagataggttcaactctgtgagatg

SEQ ID NO: 7669 - DNA, 142 bp, Protomyxzoa rheumatica
agaaagcttctgtgtagtttttatgtgaagatatttcctttttcaccataggccataaagggctcacaaatattttttgcaaatactacaaaaagactttttccaaactgctcaatccaaagaaaggttcaactctgtgaga

SEQ ID NO: 7670 - DNA, 142 bp, Protomyxzoa rheumatica
tgaatgtattttcctcacataggattccagaacaatgctacgagggtctgaatgtttgtccaacacgtaggattacagaacaccccagctgtgttatgaatgattgtccctcacataggattccagaaaactcctgctctgg

SEQ ID NO: 7671 - DNA, 123 bp, Protomyxzoa rheumatica
agagttgaaacttcctgttgatagaggtgtttggaacagtctctttgtaggatttgcaagtggatatttggagatatttgaggccaatgttgaaaaaggaaatactttcacataaaaccatga

SEQ ID NO: 7672 - DNA, 261 bp, Protomyxzoa rheumatica
ccattcgattccattcgatgatgactccattcaagtcagttagatgattccatatgattccattcgatgatcattccattcgagtacattcaatgattccatttgattttattcgatgatgattccattcgattccactcaatgatgattccactcgagtccattcgatgattccatttgatttcgttcgatgatgattccattcaactccattcgatgattccacactattctatttgatgatgattccattcgagtaca

SEQ ID NO: 7673 - DNA, 263 bp, Protomyxzoa rheumatica
actggatatttgtagtgttttgaggcctacagaggaaaaggaaatatcttcacataaaacctagaaagaagcattctgagaaaattctgtgatttttgcattcatctcacagagttgaagatttcttttgattgagaaattttgaaacaatgattttgtggaatctgcaggtggatatttggattgttttcaggtctaatgtggaaaagaaaacatcttcacaaaaaaactacacaaaggcattttgagaaacttctttgtga

SEQ ID NO: 7674 - DNA, 145 bp, Protomyxzoa rheumatica
tcaaagcgctcacaaatatccttttgcagattctacaaaaagactgtgaccaaaatgctcaatcaatagaatggttcaactctgtgagatgaatgcacacatcacagaaaagtttctcagaaagattctgtttagttttcatgtg

SEQ ID NO: 7675 - DNA, 124 bp, Protomyxzoa rheumatica
ggaatggaatgaaatggaatggtatgaaatgaaggggagaggagtggagtggagttgagtggaatgggtttgagtggagtggatcgcactgcagtggaatggaaaggaatggaatggaaagcag

SEQ ID NO: 7676 - DNA, 157 bp, Protomyxzoa rheumatica
tcatctcacagagttaaacctttcttttgattgagcagttctgaaactccctttttgtagaatctgccagtggacatttggagtgctttgagatctatgttggaaaaggaaatatctttacataaaaactagacagaagaattctgagagacttctt

SEQ ID NO: 7677 - DNA, 188 bp, Protomyxzoa rheumatica
ctctttttgtggaatctacaagtggatacttggattgctttgaggatttcattggaaacgggaattcatataaaaagtagacagcagcattctcagaaatttctttttgatgtttgctttcaactcatagagttgaacatttcctttcatagagcaggtttgaaacacactttttgtagtatgtgcaa

SEQ ID NO: 7678 - DNA, 183 bp, Protomyxzoa rheumatica
gatgaatattgcttttgattgtgcagttttgaaacactgtttttgtagaatctgcaactggatatttggagccctttgcagcctatattggaaaaggaaatatcttcagatagaaactacagagaaacattctgagaaacttatttgtgatgtgtgcattcaactcacagagttgaaactttc

SEQ ID NO: 7679 - DNA, 169 bp, Protomyxzoa rheumatica
tcaggacagagatatgtcacaatgtcccctgtaagcagatcccagaaaagagttgcagcacctgggtgatcagtgcagagatatgtctcaatgtcccctgtcggcgaagcctatacaacagttacatcatctcggtgatcagtgcagtgatatgtgaaaatgcccctgt

SEQ ID NO: 7680 - DNA, 165 bp, Protomyxzoa rheumatica
gatcacccaggtgatggaacccttatctaggctcttccaaccgtggcattgtgacatatctctgcacagatcacgcaggtgatgtaaatcttttctaggatctacctacagggtgctttgtgacatgtctctgcagtgatcacccaggtgatataccacttgtca

SEQ ID NO: 7681 - DNA, 140 bp, Protomyxzoa rheumatica
tgcacacatcacaaagaagtttctcagaatgcttctgtctggtttttatgtgaagatatatccttttccaccataggtctcaaactcacaaaatgtacacttgcagactctacaaaaagagtgtttcaaaactgctctat

SEQ ID NO: 7682 - DNA, 248 bp, Protomyxzoa rheumatica
tataatttgggtaatttgatattttgtgtgcagtatataatacatattttttgtactttgatattttatttacagtatataatatatattttgtttagtttgatattttatgtacagtatacaatatatattttgggtatttgatattttatgtacagtataaaatacatactttgggtacctttatattttatgtacagtatataacacatacattgggtactttcatattttatgtacagtatata

SEQ ID NO: 7683 - DNA, 164 bp, Protomyxzoa rheumatica
tgaatgcacacatcacaaagaagtttctcagaatgcttccatcaagtttttatgtggagatatttcctttctagcatcgacccctaagcactccaaatatccacttacagatccttcaaaaagtgtgtttcaaaactgctgaatcaaaagaaaggttcaactct

SEQ ID NO: 7684 - DNA, 265 bp, Protomyxzoa rheumatica
ttctgtgtagttttgaggggaagatatttccatttgcaccgtaggactcaaagcgctgcaaatgtccagttccagaaacttcaaaaagagtgtttcaaacctgctctatgaaatggaatgttcagctgtgtgacttcaatgcaatcatcactaagaggtttctgagaatgtttctgtctagattttatctgaagatattcccgtttccaacgaaatcggtagaggtatccaaatatccacttgcagattctgcaaaaagagtgtt

SEQ ID NO: 7685 - DNA, 139 bp, Protomyxzoa rheumatica
gaacctcgtatcagtgttctggaatcctatatgatggacatacctgtagaccccagcagcagtgttctggaatcctacgtgagggacaatcattcaaaccctcatagcagtgttctggaatcctatgtgatggacaaac

SEQ ID NO: 7686 - DNA, 152 bp, Protomyxzoa rheumatica
atacctttgcactgatcacccaggtgatggaactcatctaagttctgcctacagtagttttgtgacatatctcttcattgatcacttgggttatgtaacacttttataagcactgcctacagggaattttaaaaaaatttctgcactgatca

SEQ ID NO: 7687 - DNA, 137 bp, Protomyxzoa rheumatica
tttatatgtaatcccgtttccaacgaaatcctcaaagctagccaaatatccacttgcagattccacgaaaacagtgtttcaaaactgctccttcaaaacgatggttcaatcctgttagttgagcaaacacatcacaa

SEQ ID NO: 7688 - DNA, 185 bp, Protomyxzoa rheumatica
aaactttcttttgattgagcagttttgaaacactctttttatagagtgtgcaagtggatatttggagcgctttgatgcttatggtggaaaagcaaatatcttcacataaaactacagagaagcattctgacaaagttctttgtgctgtgtgcattcaactcacagagttgaacctttcttttgat

SEQ ID NO: 7689 - DNA, 211 bp, Protomyxzoa rheumatica
catacgattcgactcaattaagtccactcctttcgaatcctttccagtccactgcattccatcccattctattcaattccattccattttattcgattccattccatgcaattccattccattcgaatccattccattcctttccattccattcaattccatttcattcaattccattccgttcgaatcctttggattccattccattcca

SEQ ID NO: 7690 - DNA, 239 bp, Protomyxzoa rheumatica
tttcaacactgctctatcaaaataaggtttcaagtctgtacgtttaatgcacacatcaaaagcagtttctgagaatgcttctgtctagtttgtaggtgaaggtattcccttttccatcttagacctcaaatcactaaaaatatccacctgtatatattacaaaaagactgtttcaaaacctctctctcaaaaggaaggctcaactctgtgagttgaatgcacacatcacaaagcagttt

SEQ ID NO: 7691 - DNA, 125 bp, Protomyxzoa rheumatica
agcactttctgacagtgattctgtctagtttatctatgaagatattcccttttctaccacaggcctcaaaccgctataaatatccacttggaaattctacaaacagtatctcaacactgttatat

SEQ ID NO: 7692 - DNA, 159 bp, Protomyxzoa rheumatica
ttatatgaaaatatttccttttctaccataggattcaaagcgctctaaatatccacgtggaaattcaacaaaaagagtgtttcaaatctgctccatcaaaaggaaggttcaaatctgtgagttgaatgcatacatcacaaagtagtttctgggaatgat

SEQ ID NO: 7693 - DNA, 135 bp, Protomyxzoa rheumatica
atgtactgtacataaaatgtcaaaaggtacaccaaatatgtattatatagtgtacataaattattaaagtacaccaaatacatattatatactggacataaaatatcaaaaagtacaccaaatacacattatata

SEQ ID NO: 7694 - DNA, 317 bp, Protomyxzoa rheumatica
actgatcaccctggggagggaactcttgtgtatgctctgcctacaggaggctttatgacttatacctgcactgatatcctaggtgatgtaactcttgtctagacactgcctacacgggaattctcacatatctctgcactgatcacccaggtgacggactcttgtcttggatctgcctatgggggcattgtgacatacctctgcactgatcactcaggtgatgaaactgttgtataagctctgcctacaggggaattgtaagagatctcgccactgatcacccaagtaagtgatgtaaatattgtctaggctttgca

SEQ ID NO: 7695 - DNA, 136 bp, Protomyxzoa rheumatica
tccagatactacaaaaagagtgtttcaaaccttctctgtggaagggaatattgaactctgtgacttgaatgcagatatcacaaagaagtttctgaaaatgcttctgtcgagattttatatgaagatattcccgttt

SEQ ID NO: 7696 - DNA, 203 bp, Protomyxzoa rheumatica
gaatggaatcaacacgagtggaatggaatggaacataatggaatcaacccgagtggaatgaagtggaatgtaatgcaatgggatggagtggaatcaacccgagtggaatagaatggaatggaacggaatgaaatggaatggatcggattggaatccagtggagtcaactggaatggaatggaatggaatggaatggaatggaa

SEQ ID NO: 7697 - DNA, 143 bp, Protomyxzoa rheumatica
tccattccattcggtttgaaggcattccattcgagccctttcaatttgagtccattcctttccagtccatttcactccagaccattattatccgttccataccattccatcccattccatcccattccattccattccattcc

SEQ ID NO: 7698 - DNA, 138 bp, Protomyxzoa rheumatica
catcattgcatggaaccgaatggaatcatcaaaagggcttgaatgcaatcatcgaatggactcaaatggattcatcatcgaatggaatcaaaaggaatcattgaattgaatcgaatggaattatcatcgagtgaatcg

SEQ ID NO: 7699 - DNA, 191 bp, Protomyxzoa rheumatica
atatccatttgcagatactgcaaaaagactgcttccaaactgctcaatcaaaggaaaggtccaactctatgagttgaatgcacgcatctcaaagagatttctcagagtggttctgtctagtttttatgtgaagatatttgcttttccaccagtggtctcaaactctccaaatatccacttgcagattctac

SEQ ID NO: 7700 - DNA, 123 bp, Protomyxzoa rheumatica
gaaagatgctaactatgaaactggtattggatgtgtagtttcatcacacagagttaaacctttctttggaatcagtagtttggaaacactctttttggagaacctgtgaagggacatttggga

SEQ ID NO: 7701 - DNA, 150 bp, Protomyxzoa rheumatica
tagcgttctatgaagaaatcccgtttccaacgaaggcctcagagaggtccaaatatccacttgcagacttataaatggagagtttccaaactgctctattaaaagaaaggttaaactctgtgagttgaaggcacacatcagaaactagtt

SEQ ID NO: 7702 - DNA, 144 bp, Protomyxzoa rheumatica
cattccattctattccgtaccattccattcctttccataccattccattctattcggattaattccattccatgccattccactccattctattccattctatagcaatcgagttgaatccattgcatttcattccattccatt

SEQ ID NO: 7703 - DNA, 179 bp, Protomyxzoa rheumatica
tattccattcaattccattcgatgatgtttccattcgagtccattagatgattccatttgattttattcgatgatgattccatttgattctgttagatgattccattcgagtcctttcaaagatgattccattcaattgcattcgatgatgattccattccatttcaatcaatgattct

SEQ ID NO: 7704 - DNA, 134 bp, Protomyxzoa rheumatica
tgaaggtaactccttttccaccataggccccaaagtgcaacaaatgaacacttgcagatgctacaaaaagtgtgtttcaacactactctatcaaaagaaagtttcaactcagtgaggggaatgcgcacataaac

SEQ ID NO: 7705 - DNA, 145 bp, Protomyxzoa rheumatica
ttgacatggattggaatggagtggagtggactggagtggattggaatgaaatggtgaaaagaaatgtgtgacacagggagaccctgttgaaagaaatgagtggaatagaagggattggaatggaatggaatggaattgattggag

SEQ ID NO: 7706 - DNA, 146 bp, Protomyxzoa rheumatica
tccattccattcctctcgggttgattccgtttcattccattccattccaatgcacttgggttgattccagtccctaccattccattccattccattctattcatttacattaccctccggttgattccatagcattccattccatt

SEQ ID NO: 7707 - DNA, 176 bp, Protomyxzoa rheumatica
ttcaaaacggctcaatcaaaagaaaggtttaattctgtgaggtgaatgcacacatcaaaaagaagtttctcaaattgcttcggtctagattttatgtgaagatatttccttttttaacataggccaaaaagtgcttcaaatgtccacttgcagattctacaaaaagagagtttcaa

SEQ ID NO: 7708 - DNA, 149 bp, Protomyxzoa rheumatica
agatatttccttttttaacataggccaaaaagcgcttcaaatgtccacttgcagattcaaaaaaaaaaagagaatttcaaaactgctgcatcaaaagaaagactcaactatgtgagatgaatgcacacatcacaaagaagtttctcaga

SEQ ID NO: 7709 - DNA, 133 bp, Protomyxzoa rheumatica
cactaggtttccacatggtattccacacaatattccacatggtgttccacatggtattacacaaaatattccacaaaatattccacatgatattccacatggcattccacgtggtattccacagaatattcca

SEQ ID NO: 7710 - DNA, 133 bp, Protomyxzoa rheumatica
atcattctcagaaactgctgcgtgatgtgtgcatgcaactcacagagttgaacattcctttggatagagcagtttcgaaactctcttttttctggaatctgcacatggataggtggaactctgtgaagatttc

SEQ ID NO: 7711 - DNA, 176 bp, Protomyxzoa rheumatica
tgttactcttttccactctctgcctacagtggtctttgtgaaatatctctgcagtgatcacccaggtgatgggacttttctctatactctgcctagaggggatttttgacatatctctgcactggtcaccaaggtgatggaagtcttttcgaggctctgtctatgggggcattttg

SEQ ID NO: 7712 - DNA, 154 bp, Protomyxzoa rheumatica
ggagtccatcacctgggtgatcagtgcagagatatttaccaatgtcccctgtaggccgtgcctagacaagagttgcatcacgtcagagatcagtgtatagatatgtcacaaagcctcctgtagtcaaagcccatacatggcttacatcacctag

SEQ ID NO: 7713 - DNA, 158 bp, Protomyxzoa rheumatica
tgatgggactcttctctatactctgactagagggggatttgtgacatatatctgaactgatcacccaggtaatggaagtcttgtctaggctctgtctacgggggcattgtgtcaaatatctacacgggaattttcacatatctctacactgatcacct

SEQ ID NO: 7714 - DNA, 138 bp, Protomyxzoa rheumatica
ttcacataaaaactacactgaatcattctgagaaacttctttgtcatctgtgcattcatctcacagagttgaacctctcttttgatagagcagtttggaaacactcattttgcagaatctgcaagtggatatatacag

SEQ ID NO: 7715 - DNA, 140 bp, Protomyxzoa rheumatica
tgatcagtgcagagatatttcacaatgccccctgtaggcagagagtggacaagagttacataacctgggtgatctctgtagagttacgtcacaatacccactgtaggtggagcctagacaagagttacatcacctgggtg

SEQ ID NO: 7716 - DNA, 145 bp, Protomyxzoa rheumatica
tggtacggaatggaattgaatggaatggaatggaatgatgaaatgaaatgtgatctaagattgtgccactgaactccagtctggttgacagagtgagatctagtagaaataaaggaatggaatggaatggagtagaatggaatgg

SEQ ID NO: 7717 - DNA, 159 bp, Protomyxzoa rheumatica
aaccctgtgtttgtaaagtctgcaagtggatatttggacctcttagatgccttcgttggaaacgggatttcttcatataatgctagagggaagaattcttagtaacttctttgtgttgtgtgtattgaactgacagagttgaaccttcctttagacaga

SEQ ID NO: 7718 - DNA, 165 bp, Protomyxzoa rheumatica
gtttcaaaactgttctatcaaaagataggttcaactatgtgagttcaattcacacatcactaagaagtttttcagaacacttctgtttagtttttaggggaagatatttctttttccacaataggactcaaaacgctccaaatatccaattgcagattctacaaa

SEQ ID NO: 7719 - DNA, 153 bp, Protomyxzoa rheumatica
ggtctgaatgtttgtccctcacataggattccagaacactactgctggggtccgaatatttgtccctcacattggattccagaacactgctgctgggatctcagtgtttgtccctcacataggattccagaacatggctacgatgctctgaat

SEQ ID NO: 7720 - DNA, 154 bp, Protomyxzoa rheumatica
tatccaccataggcctcaaagcgctccaaatgtccacttttagattctacaaaaagagtgtttcaaaactggacaatcaaaagtaaggttcaactctgtgagatgattgcacacatcacaaagaaatttctcataatgcttctgtttagttctt

SEQ ID NO: 7721 - DNA, 180 bp, Protomyxzoa rheumatica
gaatcgaatgcaatagtatggaatggaatcgaatggaatgcaatcaaaaggaatgtaccagaatggaatggattggattagaacggactcaaatataatcgattgcaaagtaaatgattcgaatggattggaattgaatcgaatgtaacaaatggaatggaaaggaatgcaatggaatgg

SEQ ID NO: 7722 - DNA, 122 bp, Protomyxzoa rheumatica
aaatgtgagctcagattgtgcactgcactccaacctgggtgacagagtgagattccatcaaaagaaaggaatggaatcgaatggatttacaatggaatgtaatgtaatggagtggagtggag

SEQ ID NO: 7723 - DNA, 411 bp, Protomyxzoa rheumatica
ctagacagaagcattctcagaaacttgtttgtcatgtgtgtactcaactaacagtgttgaagctttcttttaatggagcagttttcaatctctctttcagaagaatctgcaagtggatatttggatagctttgaggatttccttggaaacgggaatagcttcatataaaatctagacagaagtattctcagaaactacttggtgatgtttgcattcaggtcacagagttcaatattccatttcatagagcaggtttgaaaccctctttttatagtatctggaagtggacctttggagcgattgaggcctatggtgaaaaacaaaaattcttcccataaaaactagactgaagcactctcagaaacttgttcctgatgtgtgtactcaactaacagagttgaacctttcttt

SEQ ID NO: 7724 - DNA, 138 bp, Protomyxzoa rheumatica
tgcattccattgcattccattctattccattccattgcatatcattacatttcctatgattacattccatttgattccattcagctcaaatcaattggattgcaatccattacattcgagtccgttctattccagtcc

SEQ ID NO: 7725 - DNA, 144 bp, Protomyxzoa rheumatica
acatttcttttgattgagcagtttggaaacacacattttgtagaatcttcaagtagatatttagagagtttgaggcctccagtggaaaaggaattatcttcaattaaaaactacacagaaggattctgagaaacttctttgtga

SEQ ID NO: 7726 - DNA, 124 bp, Protomyxzoa rheumatica
tctcacaaagctgaaactttcttttgattgagcagttttggaacactctttttgtagtatctgaaagtgtacatttggatcgctttggggcttatggtggaaaaggaaatatcttcacataaaa

SEQ ID NO: 7727 - DNA, 122 bp, Protomyxzoa rheumatica
attccattccattacattcctttccactcgggttgattcagttccattctattccattcctctccattccattctattccattacacactggttgattcaattccattctattccattgcat

SEQ ID NO: 7728 - DNA, 185 bp, Protomyxzoa rheumatica
gagtgtttcaaacatgctctatgaaagggaatgttcagttttgtgacgtgaatgcaaacatcacaaagaagttcctgagaatgcttttctctagattttatatgtaatcccttttcaaacgaaatcctcaaagctatccaaataaccactttcagattccacaaaaagagtgtttcaaaactgct

SEQ ID NO: 7729 - DNA, 167 bp, Protomyxzoa rheumatica
gctcaactctgtgagttgaatgcacacaacacaaagcagtttctgagaattcctctgtctagtttttatgtgtagatatttccttttcctcatatgactcaaatcgctccaaatatcctcttgctgatactacaaaaagactgtttcaaaactgctctctcaaaagg

SEQ ID NO: 7730 - DNA, 174 bp, Protomyxzoa rheumatica
ctgtgtagtttttatgtgaagatgttctgttttctaccatagggcgaaatggggctccaaatctctacttgcattttctacaaaaggagagattctaagctgctcaatcaaaagataggttcaacactcttagttgaatgcacacatcccaaagaagtttctcagaatgcttct

SEQ ID NO: 7731 - DNA, 497 bp, Protomyxzoa rheumatica
gttgtgtgtattgatctcacagatttgaaccttcctttagacagagtagttttgaaaaactctttctgtggaattcgcaagtggagatttcatgtgatttgaggccaatctttgaaatggaaatatcttcgtgtaaaattagacagaatcattgtcagaaactactttgtgatgtgtgcgttcagctcacagagtttcacctttcttttcatagagcagtttggaaagactctgtctgtaatgtctgctagtgaatatttggacccctttgaggccttcgttggaagcggaattttttcatatactgctagacagaagaattctcagtaaatctttgtgctgtgtgtattcaacacacagagttgaaccatcctttatcctgagcagttttgaaacactctttgtgtggaatttgcaagtggagaattcaagcgatttgaggccaatcttagacatggaaatatcttcgtagtaaaactacacagagtcattcgcag

SEQ ID NO: 7732 - DNA, 167 bp, Protomyxzoa rheumatica
tatttccttttccaaaataggccccaaagccctccaaatatccacttgcagattctacataaaaagtgttacaaaactgttcaatctaaagaaaggttcaactctgtgtgatgaatgcactcatcagaaagaagtttctcagaatgcttctctgtagtttttatgtg

SEQ ID NO: 7733 - DNA, 122 bp, Protomyxzoa rheumatica
ccattcgatgatgattccatgtgattccattcgatgatgactcctttcggttccatttggtgatgattccactcagttccattcgatgatgactcctttggattcccttcgaatatgattcc

SEQ ID NO: 7734 - DNA, 154 bp, Protomyxzoa rheumatica
atagaatggactcgaaaggaatggtctcgaatggaatttagtcgaatagaatggaatcgaacagaatgaaatattatggaatgaattgaatggaatggaacggattggaatggactgaaatagaacggactcaaatataatggattgtaatgta

SEQ ID NO: 7735 - DNA, 132 bp, Protomyxzoa rheumatica
ttcgacggaagcattctgagaaacttctttgtgaggttttcattcatctcacacagatgaacatttatttgattgaagatttgacaacagtatttttgtaaaatctacaaagggataattgtgaaccctttt

SEQ ID NO: 7736 - DNA, 159 bp, Protomyxzoa rheumatica
attgtctgaatgtttgtccctcacataggattccagaatgatcctatgagggtctggatgtttgtccctcacatacgattccagaacactgctatgattgtctgaatgtctgtcactcacataggattccagatcagtgctacgagggtctgaatgttt

SEQ ID NO: 7737 - DNA, 162 bp, Protomyxzoa rheumatica
cttaaactcacagacttcaaactttcttttgagagatcagggttggaacacgctttttatagaatctgcaagtgttcatttagtgcgctttgttgcctaaggtggaaaaagaaatatcttccaatgaaaactagacagaaacattctcagaaactcctttgt

SEQ ID NO: 7738 - DNA, 142 bp, Protomyxzoa rheumatica
tgtagaatcttcaagtggatatttggagcacttttagacctatggtgaaaaaggaaatatcttcacataaaaaaatatacagaagcattctgaaaaacttctttgtcatgtgtgcattcatttcatggacttgaacctttgt

SEQ ID NO: 7739 - DNA, 82 bp, Protomyxzoa rheumatica
tgcaaaggaatggaatggtatctcgagtggaatggaatggactgcaaaggaatggaatggtatctcgagtggaatggaatgg

SEQ ID NO: 7740 - DNA, 188 bp, Protomyxzoa rheumatica
actccattccattccactccactccattccattccaatcctttatttcaattggatctcactctgtcacccagactggaatgcagtggcacaatcatagctcacatttcatttcaccattccattccattccacttcagtccactcccctccactcaactccacacaactccactccattccattcca

SEQ ID NO: 7741 - DNA, 142 bp, Protomyxzoa rheumatica
actaggacccaaaagaactagaatctagaaaagacaaatgaattaagaagaaagtgtgatatagagagaaaaaattatgatcatttgactccttgaatgaataaaaaagtgtgataaagctttttaatttttataaattctg

SEQ ID NO: 7742 - DNA, 141 bp, Protomyxzoa rheumatica
gcttttacagagtagacctcaaatctctccaaatatccacttgcagattctacaaatctgtgtttcaaaacttcttaatgaaaagaaaggttcaactatgtgagatgagtgcacacatcaaaaataagtttctcagaatgc

SEQ ID NO: 7743 - DNA, 146 bp, Protomyxzoa rheumatica
agataaacccttttccaaggaagacctcaaagcactccaaatatccagatgcagactttacaaacagagtgtttcgaaactgcactatcaaaagaaatgttaaactgtgtgagctgaacgcacacatcaaaaagtagtttttgaga

SEQ ID NO: 7744 - DNA, 140 bp, Protomyxzoa rheumatica
atgtaacacttttataagcactgcctacagggaattttgaaaagtctccacactgatcacctaggtgatgtaactcttttctaccctctgcccaaagggcgcattgtgaaatatctctgcactgatcaccctggtgattc

SEQ ID NO: 7745 - DNA, 141 bp, Protomyxzoa rheumatica
ctatgagggtatgaatttctaaacctcacataggattccagaacactcctgctattgtctgagtgtttgtccctcatgtaggattcctgaacactcctgctgtggtctaaatgtttgttcctcacatactatttcagaaca

SEQ ID NO: 7746 - DNA, 211 bp, Protomyxzoa rheumatica
gggaattttgacaaatctctgcactgatcaccttggtgatgtaactcttctctaccctctgcccaaaggcggcattgtgaaatatctctgcattgatcatccaagtgattcaactcttgtccaggatctgcctacagagattattgtgaaatatctctgcactgataaactaggtgatgcaactcttctctatgctctgcctacaggggac

SEQ ID NO: 7747 - DNA, 164 bp, Protomyxzoa rheumatica
atagacaagagttacatcacccaggtgatgtaactcttttctagtctctgtctacagaggtcgttgtgacatcattctgcacggatcacccgggttatgtaactcttgtctatgctctgcctagaggggcattgggacatatctctgcactgatcgctgaggtg

SEQ ID NO: 7748 - DNA, 205 bp, Protomyxzoa rheumatica
aaggaaatatcttcaaataaaaactacacagaagcattctaagaaacttctttgtgatgtgtgcattcatctctcagagttgaagctttcttttggtggaacagttttgaaatactctttttgtagaatctgcaagtggacattttgagagccttcaggcctaaggtggaaaaggaagtatcttcatataaaaactagacagaag

SEQ ID NO: 7749 - DNA, 270 bp, Protomyxzoa rheumatica
cacatcacaaagaaatttgtcagaatgtttctgtctagcttttttgaagatatttccttttccatcatatgcctcaaagcactccaaatgtccacttgcagataatacaaaaagggagtttcaaagctattgaatcaaaagaaagattcaattatttgagatgaatgcacatatcacaaagaagttgcagaatgcttctgtctagttttcatgtgaaaattttttttcaacatatgcctcaaatctctccaaatgtccacttgcagattc

SEQ ID NO: 7750 - DNA, 132 bp, Protomyxzoa rheumatica
tgatgtgtgctttcaactcgcagagttgaacgttcctttcgatagagaagttttcaaactctctttttgttggatttccaagtggatatttaacgtcgtttggggcctatggtagaaagacaataccttcat

SEQ ID NO: 7751 - DNA, 155 bp, Protomyxzoa rheumatica
cctatggtggaaaaggaaatatcttcacataatacctagacagaagcagtctgagaaacttctttgtgatgtgtgcggtcttctcacagagttgaacctttctttttattgagcagtttggaaattctttttgtagaatctgcaagtggacattt

SEQ ID NO: 7752 - DNA, 191 bp, Protomyxzoa rheumatica
tttgcactgcatgccattccattccattccatttcattcctttccactgccctccgatccactccactcaactcccctctactgcactccactccattccgttccattccaatccattccattccattctattccattacgttccatttctttccattccactccactccactccattccactccactgca

SEQ ID NO: 7753 - DNA, 130 bp, Protomyxzoa rheumatica
acatcacctcagcgatcagtgcagagatatgtcccaatgttcctctaggcagagcttaggaaagagtcacatctcctggataatcagtgcagagttaagtcacaatgccccaataggcagagcctagaca

SEQ ID NO: 7754 - DNA, 123 bp, Protomyxzoa rheumatica
aatggagtcaaatgcaatgaattcgaatggaatggactcaaatggaattgactcgaatggcatggaattgattggaatgaaatcgaattgaatgcaatcgattggaatggaatccaaaggaaa

SEQ ID NO: 7755 - DNA, 130 bp, Protomyxzoa rheumatica
tgcctatgggggcattgtgacttacctctgcactgatcacccaggagatgtgactctagtctaagctttgcctagaggcacattgggacatatctcttcactgatcgctgaggtgatgtaaaacttgtct

SEQ ID NO: 7756 - DNA, 148 bp, Protomyxzoa rheumatica
tcattatcgaatggaatcgcatgaaatcatctaatgggcaagaatagaatcatcatggaatggaattgaatggaatcatctaatgtactcgaatgggatcatcattgaatggaatagaattgaatcatcgaatggaatcaaaaggaat

SEQ ID NO: 7757 - DNA, 137 bp, Protomyxzoa rheumatica
ccaaatggaatggaatcgaatggcatcaaatggaatcaaatagaatgcggtgaaattgagtgcagtgaagtggaatggaatggaatggggtggaatggaatagaatgaagtgtagtggagtggagtgtaaagcagtt

SEQ ID NO: 7758 - DNA, 503 bp, Protomyxzoa rheumatica
tgcaaagcctagacaatatttacatcacttacttgggtgacctgtggcgagatctctcacaattcccctgtaggcagagcttacacaacagttacatcacctgggttatcagtgcagagatttctcacaatgccccaataggcagatccgagagaagagttcgccacctgggtgatcaatgcaaaattatgtcacaatgcccacttaggcagagcctagaaaaaagccccatcacctggatgatcagtacagggttatgtcacagagttagtttaggcagatcctagacaggagttacatcacttggatgattagtgcagagatatgtcacaatgccatcgtacgcagagcctagacaaaggttacatgacctaggtgatcagtgcatagatacatcgcgatgtgcctgtaggcagagccttgatgagcggtacatcacctgggtaatccttgctgtgatacgtcacaaagcaccctgtgggcagatcctagaaatgagttac

SEQ ID NO: 7759 - DNA, 304 bp, Protomyxzoa rheumatica
taactgcacctaactaaacagaagcattctcagaaacttctttgtgatatttgcattcaaatcccagagttgaaacttcctttgataggtcaggtttgaaacactctttctgtacgatctgcaagtggatatttggaccactctgtggccttcgttcgaaacgggtacatcttcgcataaaatctagacagaagccttctcagaaacttctctgtgatgattgcattcaactcacagagttgaaggttccttttcaaagagcagtttccaatcactctttgtgtggaatctgcaagtggatatt

SEQ ID NO: 7760 - DNA, 125 bp, Protomyxzoa rheumatica
caaatggaatcctcatggaattgaaaagaatggactcatcatcgaatggattcaaatggaatcatcaaatggaattgattggaatcatcagtgaatggaatcgaaaggaatcattgaatggaatc

SEQ ID NO: 7761 - DNA, 258 bp, Protomyxzoa rheumatica
tggaaaaagaaatatcttcaaataaaaactagacagaaggattctcagaaactcctttggatgtgtgtgctcaattaacagagttgaacctttctattgacagagcagtttcaaaacactgcttttgtagactctgcttgtggataattggagctctttgaggaattcgttgtaaatggaatctcttcacatgcaaactagacagaagcgttctcaaaaactgctatgtgatgtgtgcattcaactcacacagttgaa

SEQ ID NO: 7762 - DNA, 135 bp, Protomyxzoa rheumatica
aaactctgtgagttgaacgcacacatcacaaagtagtttcagagaacgattttgtcttgtttttatatgaagatattaccttttctaccattggcctcgaggcgattgaaatctccacctgggaaatccacaaaa

SEQ ID NO: 7763 - DNA, 234 bp, Protomyxzoa rheumatica
ggagggttttgaggcccatggtggaaaaggaaatatcaaataaaaaataggcagaagaattctgagaaacttgtttgtgatgtgtccattcatctcacaaagttcaacctttcctttgattgagcagttaggaaacactctttttgtagaatctgtaattggacatttggagagctttgcagcctatggtataaaaggaaaaatcttcacataaaatctagacagaagcaatct

SEQ ID NO: 7764 - DNA, 147 bp, Protomyxzoa rheumatica
ccactgcactccgatccactccactcaactccactccactacaatccactaagttcaattccgttcccttccattcctttccgttcctttccattccccaccattccattccactccactccattccactccactccacttttctcc

SEQ ID NO: 7765 - DNA, 138 bp, Protomyxzoa rheumatica
acaaaaaagtttctgagaattcttctgtcaacttttatattaagaaatctcttttccaacaaggcctcaaaaaattccaaatattcacttgcagagtatacaaaaagagtgtttcaaaactgttctatcaaaagaaag

SEQ ID NO: 7766 - DNA, 129 bp, Protomyxzoa rheumatica
cattccactccatgccattccactccactcctttccttcccattctactccattgcattccagtcctttatttcaaatggatctcactctgtcacccagaaaggagtgcagtggcacaattttagctca

SEQ ID NO: 7767 - DNA, 144 bp, Protomyxzoa rheumatica
tgattccatttgattccatttgatgatgattccattcgatgccagtcgatgatgattccattgtattccattcgatgattccatttgattgcattcgatgatgattcctttcgggtccattcgatgattccattctattccatt

SEQ ID NO: 7768 - DNA, 207 bp, Protomyxzoa rheumatica
ctccattccattccatcccattccattccactccattccattccactacattccattccattccattacactccattccgttccattcctttctttctacaggatctcaccctgtctcccaggctggggtacagtggcacaatctcagctcacatttcatttcaccaatcccttccactgtattccattccattccattccactcca

SEQ ID NO: 7769 - DNA, 126 bp, Protomyxzoa rheumatica
attccattcctctccattccatttcactcgggttgattccgttccattccattcaataccgttccaatctactctcttccattccattccatttcactccggttgtttccattccattccattcca

SEQ ID NO: 7770 - DNA, 200 bp, Protomyxzoa rheumatica
aatggaatggaattgaatggaatggaatgaagtcgaatggaatggactcgaatggattagaatcaaatggaatggcatctaatggaatggaatggaatggaacggaatggaaccaaatgtaacgtactcaaatggaatggactcaaaaggaatgaactcaaaaggaatggtctcgaatggaatttattcgaatagaatgg

SEQ ID NO: 7771 - DNA, 243 bp, Protomyxzoa rheumatica
ccaggagcagtgttctggaatcctatgtgaggacaatgattcaggacctcgtagcagtgttctggtattctgtgtgaggtacaaactttcagactctcttaccactgttctgcaatcatgtgtgagagaaaaacattcagacccacagcaggagtgttctggaatcacctgtgaggaacaaacattcagatcctcctagcactgttctggaatcctgtgtgacggacaaacatttagacgcca

SEQ ID NO: 7772 - DNA, 153 bp, Protomyxzoa rheumatica
atgcctatggtagaaaaggcaatatatttatggaaaaactagacacaatgattctcagaaactaatttgtgatgtgtgcattctactcagagtttaacctttcttttgattgagcagttttataacattgttttgtaggatctgcaagtgaat

SEQ ID NO: 7773 - DNA, 123 bp, Protomyxzoa rheumatica
gatattttatatacagtgtaaaatatgtatttagtgtactttgatattttttgtgcggtatacaatatgtattttgtgaaatctgatattttatgtagagtatataataagtattttgtgtac

SEQ ID NO: 7774 - DNA, 137 bp, Protomyxzoa rheumatica
tccattcctttccattccattgcattccatttaactccattccatgacaatctggttgattccattccactccgttccattccaatccattcgataccattgcattccattccactattgtagattccattccattc

SEQ ID NO: 7775 - DNA, 159 bp, Protomyxzoa rheumatica
tatgtgaagatattttcttttacaccataggctgcaaatcgctccaaatatccaatagcagactctagaaaagctagagttgcaaactgctcaatcaaaagaaagtttcacctttatgtgatgaatgcacacatcacaaagaagtttctcagaatgctt

SEQ ID NO: 7776 - DNA, 178 bp, Protomyxzoa rheumatica
aaagtttgtccctcacataggatttcataactctcctgcagtgttctgaaaatttgtccctcacataagattccagaacactcctgctgtgttctgaatatttgtccctcacatacgtctccataacactcatgctgtggttataatgtttgtccctcagatagcattcaagaacact

SEQ ID NO: 7777 - DNA, 125 bp, Protomyxzoa rheumatica
atttccttaccctccacatgcctcaaagctctttaaatatccacctgcagattctacataaacagcgtttcaaaactgctctatcaaaaaaaggtccaactctgtgagttgaatgcacacatcac

SEQ ID NO: 7778 - DNA, 184 bp, Protomyxzoa rheumatica
ctctgcctatgaggcatagtgacatatcactgcattgataaccgaggtgacgtaactcttgtcgagcctctgactatagggggccttgtgacaaatctctgcactgatcatctatgtgatgtaactcttgcttatgctctgcctgcaggagcattgtgaaatatctctgcactgatcacccagg

SEQ ID NO: 7779 - DNA, 145 bp, Protomyxzoa rheumatica
ggtgaaaaaggaaatatcttcacaaaaaaactacaaatatacattctgagaaacttctttgtgatgtgtgctttcacttcacagagttgaaactttcttttgattgagctatttggaaacagtctttttgtggaatctgcaaatg

SEQ ID NO: 7780 - DNA, 146 bp, Protomyxzoa rheumatica
aaaaaaaaaaaactacaaaggagcagtctgagaaacttctttgttatgtgagcatttatctcacagagttgaacctctctttggattgagcagttttgaaacactctttgtagaatctgcaagaggttacttggagcgctttgaag

SEQ ID NO: 7781 - DNA, 147 bp, Protomyxzoa rheumatica
actgctttgtgatgtgtgcattcaacacacggagttgaaccttcctcctgagagaacatttttcacacagtctttttgtagtatctgcaagtcgatatttggaacgctttgaggcctatgagggaaaaggaactatcttcacataca

SEQ ID NO: 7782 - DNA, 155 bp, Protomyxzoa rheumatica
gaaactactttgtgatgtgtgcattcatctcacagtgttgaaattttcttttgattgagcaattttgaaacgctgttttcgtagaatctgcaagtggatattcggagtgctttgaggcctactgtggaaaaacaaatatcttcacataagaacta

SEQ ID NO: 7783 - DNA, 289 bp, Protomyxzoa rheumatica
aagagttacatcaaaaatgtgatcagtgcagagatttgttaaaattccctgtaggcagtgtttataaaatcgttacatcacctagatgatcagtgcagagatatgacacaatgctcctgtaggcagaaattagataagttacatcacctgggtgatcagtgcaaagttatgtcacaaagaccccgtaggcaaagcctagacaatagttacatcacttgggtgatcagtggagagatctctcacaattcccctgtaggagaggttacacaacagttacatcacctgggtg

SEQ ID NO: 7784 - DNA, 125 bp, Protomyxzoa rheumatica
tgtcctcaagttttatcatccttaatgcctccatttttgggttttccatttacctattcaaccaatacttgaggtcctactatgtgtggtagggacacagtttgtacaggcaggtctggttaggt

SEQ ID NO: 7785 - DNA, 158 bp, Protomyxzoa rheumatica
ccgatctagcttcatctgtgttagttgagtacacacatcacaaacaagtttctgagaattctactgtgtagtttttaggggaagatatttccattttcaccataggcctcaaagtgccccaaatgtccacttccagataccacagaaagagtgtttca

SEQ ID NO: 7786 - DNA, 196 bp, Protomyxzoa rheumatica
ggaatttgcaagtgtatatttagagcgctttgaggcctactgtagaaaaggaaatatcttcacatcaaaactagagagaagcattctcagaaagtgctttgtgatgtgtgcattcacctcacagagaggaaccgttcttttgattgagcagttttcaaacagtctttttgtaggatctgcaagtgttcatttggag

SEQ ID NO: 7787 - DNA, 155 bp, Protomyxzoa rheumatica
agtgttcattttgagcgctttgaggcccatgatggaaaagttaatattttcacataaacctagacagaagctttctcaggaatttcattgagatgtgtgcattaaggtaactgatttgaatacgtcttttgatagagcagtattgaaacacttct

SEQ ID NO: 7788 - DNA, 145 bp, Protomyxzoa rheumatica
tgcctacaggggctttgtgacacatctctgcactgatcactcagatgatgggacttttgtctaggctctccctaagggggcattgtgacatatctctaaactgatctcccaggtgatgtaacacttatgctggatctgcctatgg

SEQ ID NO: 7789 - DNA, 179 bp, Protomyxzoa rheumatica
ttgtctaggctctgcctacagtggcattgtgacatatctctgcactcatcatccaagtgatgtaacacttgtcttggatctgcttaaagggactttgcgacataactctgcgctgatcatccaggtgatgggacttttgtctaggctctgcctaagggggcattgtgacatatttctgc

SEQ ID NO: 7790 - DNA, 124 bp, Protomyxzoa rheumatica
cactgcagaagtgaaagcctgtcagggtaacgtgttcagttttacatcgtaatcagagtgggtcgatctctgttgaaggcagaattaaaaaccccttcaacattttttaaataatagatgaaaa

SEQ ID NO: 7791 - DNA, 165 bp, Protomyxzoa rheumatica
aatggactcgaatggaatcatcaccgaatataatcaaaagcaatcatcaaatggattcgtaataaatcatcgaatgggctcgaatggaatcatcatagaatggaataaaatggaatcatcatcaaacagaatcaaattgaatcatcgaatagaatggaatggaat

SEQ ID NO: 7792 - DNA, 128 bp, Protomyxzoa rheumatica
acttgcagattctacaaaaagagtgtttccaaacagctcattcaaaagaaaacttcaactctgtgagatgagtaaacacctcgcaaagaagtttcacagaatgattctgtgtagtttttatgtgaaga

SEQ ID NO: 7793 - DNA, 123 bp, Protomyxzoa rheumatica
aatttattcgaatagaattgaatcgaatggaatgcaacagtatgcaatggaatcgaatgaaatggaatcgaacggaatggacaagaacagcatggactggaatagaacggactcgaatgtaat

SEQ ID NO: 7794 - DNA, 164 bp, Protomyxzoa rheumatica
tctttttgtacgatttccaaagtatatatttagcgccatttgaggcctaaggtagaaaaggcaatatcttcataaaaaactagacagaattattctcagaaacttctttgagatgtgagcgtttaactcacagagtttaacctttcttttgatagagcagtttt

SEQ ID NO: 7795 - DNA, 153 bp, Protomyxzoa rheumatica
gcaaatcgctccaagtgtctacatgcagtttccaaactgttcaatcaaaagaaaagttcaactctgtgagatgaaagcacatatcacaaagaagtttcccagattgcttctgtctggattgtatgtgaaggtatttccttttctaccataggc

SEQ ID NO: 7796 - DNA, 196 bp, Protomyxzoa rheumatica
tttctcagaatgcttctgtctagtttttatgtgaagatataaaattttccactataggccacaaagcgcttcaaatatccacttgcatattcttcaaaaagagtgtttcaaaactgctgaatcaaaataaagtttcaactctgtgaggtgattgcacacatcataaagaagtttctcagaatgcttctgtgtagtt

SEQ ID NO: 7797 - DNA, 144 bp, Protomyxzoa rheumatica
ttcgagttctattccagtccattgcattccggtgcatgccgttccattccattccattcgcttccgttccattccaatcgattgcattgcaatgcttcacattcgagtccgttttattccagtccaatccattccggtccattc

SEQ ID NO: 7798 - DNA, 169 bp, Protomyxzoa rheumatica
gacttgaaccttccttttgaatgtgcagttttgaaatactctttttgtagaatttccaagtgtatatttagagcgttttgaggcctagggtaaaaaaggaaatatcttcataagaaaaccagacagaatcattctgagaaactactttgtgatgtgtgcattcatctca

SEQ ID NO: 7799 - DNA, 124 bp, Protomyxzoa rheumatica
ggaagtggacattttcgatcgatttcaggcctatgttgaaaaggatatatcgttaacataaaaactagacaggagcattctcagaaacgtccttgtgatgtgtgtcctcaactaacagagttca

SEQ ID NO: 7800 - DNA, 128 bp, Protomyxzoa rheumatica
cttaaagcataaaaataataaaaaaaaacaaaaaacaaaaagaagtttctcagaatacatctgtctaatttttatgtgaagatacttccttttccactttaagacgcaaagttctccaaatatccaca

SEQ ID NO: 7801 - DNA, 197 bp, Protomyxzoa rheumatica
ggactatgctgaaaaaggaaatatcttcagataaatactggaaagaagtgttatgagaaactgctttgtgaagtttgcattcatgtcactgggttaaatccttgttttgatggaacagttcaaaaacacgtttttcagaatctgcaaagggttatttaggagcacattgaagactatgctgaaaaaggaaatatctt

SEQ ID NO: 7802 - DNA, 135 bp, Protomyxzoa rheumatica
taaataacttcttataaaaactagaaataatgtttctgagaaactgcattgtgatgtgtgcattcatctcacagagataaacctttctttacattcggcagtttggcaacactgtatttttaggatctgtgaagg

SEQ ID NO: 7803 - DNA, 135 bp, Protomyxzoa rheumatica
tggaatggactggaatagaacagactcgaatgtaatgcatggcaatgtaattaatttgaatggaatcgaatggaatggagtcaattggaatggaatctaaaggaatggaatcgaatgaaatagaattgaacggaa

SEQ ID NO: 7804 - DNA, 135 bp, Protomyxzoa rheumatica
aaagaaatatcttcagataaaaccagacagaagtattctgagaaacttctttgtgatgtatccattcatctcacagagttgaacctttcctctgatggagcagtttggaaacagtctttttgtagtatctgcaga

SEQ ID NO: 7805 - DNA, 239 bp, Protomyxzoa rheumatica
tggtagaaaagaaaatatgttcgtagaagaactacacagaagcattctcagaaactactttgtgatggttacattcaactcacagagttgaagattcctcttgatagagcagtttgtaacactctttttgtagaatttgcaagtgagtatttagagcgctttgaggcctgtgatagaaaaggaaatatcttcaaataaaaactagatagaagcattctcagaaacttatttgcgatgtg

SEQ ID NO: 7806 - DNA, 168 bp, Protomyxzoa rheumatica
tgtctagttagtatgtgaagacatcccgtttacaacgaattcctcaaagaactcaaaatatccacaagcagattctacaaaggcagtgtttcaaaactgctctatcaaaagaaacgttcatctctgtgaattgaacacacacatcaaaaaggagttgctgaaaatgct

SEQ ID NO: 7807 - DNA, 341 bp, Protomyxzoa rheumatica
ctttgatattttatgtacagtttattataaatgtttggttcctttcatattttatgtacagtatacaatacatatttcgggtaatttaatattttatgtacagtatatattgtatacttggtgtactttgatattttatgtacagaatataataggtatcggatgtaccttcatattttatgtacagtatataatatacactttggatactttgatattttatgtacagaatataatacaaactttggggacttttatattttatgtgcagcatataatatatatttgatgtactttcatcttttatgtacagtatataatatatatttggtgtaatatga

SEQ ID NO: 7808 - DNA, 149 bp, Protomyxzoa rheumatica
cattccattccatttctctcgagtggattccattccattctattgcattccactcaattcctttccattccactcgagttgattccattccattctattgtattcctaacattccattccattctattccattgcattccattccattc

SEQ ID NO: 7809 - DNA, 160 bp, Protomyxzoa rheumatica
taatggaatggaatgcaggttagtggaatggagtggaatggagtagagtggagtggagtagagtcgagtagaatggaatggaatggaatggtgaaatgaaacatgggctgagattgtgccactgcactaaagcctgggtgacagagtgagatcctgtcaa

SEQ ID NO: 7810 - DNA, 141 bp, Protomyxzoa rheumatica
gtctagtttttatgtgaagatatttccttttatacggtaggcctcaaagcgctctatatatacacttgcaaattccccaaaagactgttttaaaactgctctatgaaaaggaaggctaacctctgtcagctgaatgcacac

SEQ ID NO: 7811 - DNA, 128 bp, Protomyxzoa rheumatica
gacatcacctgggtgatcagtgcgcagatatgtcacaatgtcttcagtaggcactgatcaccccagggagaaaacacttttctaccctctgcctacaggaggctttatgactgaatccctgcactaat

SEQ ID NO: 7812 - DNA, 135 bp, Protomyxzoa rheumatica
caagaacactgttgctgggttctgaatgtttgtccctcacacagcattcaaaaacactgctgctggggtctgaatgtgcctcacataaaattccagaacactgttaggagggtctgaatgtttgaccctcacata

SEQ ID NO: 7813 - DNA, 157 bp, Protomyxzoa rheumatica
ggagtccattcaattccattgaattccactcgagtccattccactccactccattcgagttcattccattccgctccattccgttcaattccattcctttctcttccattcgagtccattacattacattctatttgagtccattccatttcattac

SEQ ID NO: 7814 - DNA, 128 bp, Protomyxzoa rheumatica
tgatcagtgcagagatatatcacaatgtcccctgtaggcagagcctagacaagagatacatgacctatatgatcagtgcagagatacatagcaaagcccttgtaggcagagctttgacaagtggtaca

SEQ ID NO: 7815 - DNA, 127 bp, Protomyxzoa rheumatica
ctgcattgatcacccaggtgatgtaactgtcgtataaactctgccgacaggggaattgtgagacatctcgccactgatcacccaactgatgtatctattgtctaggctttgcctacagggggctttg

SEQ ID NO: 7816 - DNA, 125 bp, Protomyxzoa rheumatica
aatgcttctgtgtagtttttatgtgaacatatttgattttccacaattggccgcaaagtgctccaaatatccacttgctgatttccacaaaaagtgtgtttcaaaactgctcaatcataaggtag

SEQ ID NO: 7817 - DNA, 195 bp, Protomyxzoa rheumatica
tgagtacacacaccacaaataagttactgagaattcttctgtcgaacattgcttgaagaaatcccgtttccaatgaaggcctcaaagaggtccaaataaccacttgcagacattacaaacagagtgtttccaaactgctccatcaaaagaaagtttaaactatgtgagctgaacacacacatcaaaaagaagttt

SEQ ID NO: 7818 - DNA, 139 bp, Protomyxzoa rheumatica
ttgaaccatcctttcgagagagcagttttgaaccactcttttggtagaatctgcaagtggatatttggaattctttgaagccttcgttggaaacgggtataacttcacatgaaaactacacggaaccatactcagaaac

SEQ ID NO: 7819 - DNA, 176 bp, Protomyxzoa rheumatica
ttccattgcattccattccattccattccattccattccattctgatagattccattccattccattccattcaattccattacattccattgcactcgggttgattccattccgttctattccactcagttacactcccttccattccactcggaatgattccattccattccat

SEQ ID NO: 7820 - DNA, 125 bp, Protomyxzoa rheumatica
tcttgtctaggctcagcctacgggggcattgtgacttatctccgcactgatcacccaggagatgtgactcttctctaagctctgcctagaggcacattgggacatatctctgcactgatcgctga

SEQ ID NO: 7821 - DNA, 159 bp, Protomyxzoa rheumatica
gatgacgattccattcaattccgttcagtgattccatttgattccatctgatgttgattccattcgattccattttatgatgattctatgcaattccagttgatgatgactcctctcattaccattcgatgatgattccattcgtttccatccgatgat

SEQ ID NO: 7822 - DNA, 124 bp, Protomyxzoa rheumatica
aataaaaactaaacagaagcattctgagaaacctcttggtgatgtgtgcattcattgtacaaagttgaatatttcttctgattgagcagttttgcatctttccttttgtagaatatgcaagtgg

SEQ ID NO: 7823 - DNA, 143 bp, Protomyxzoa rheumatica
agacaagagtccgtcacctgggtgatcagagcagagatatttgagaattcccgtgtaggcagagcctcgagaagtgttacataacctaggttatcagtgccagtataaatcataaagaatcctgtaggcagagcatagacaag

SEQ ID NO: 7824 - DNA, 122 bp, Protomyxzoa rheumatica
attccattccggatgattccattccattgcattccattcctttttattcccctgcactcgggttgattccattccattccattacattatattccgttccattacattccattccattcgga

SEQ ID NO: 7825 - DNA, 179 bp, Protomyxzoa rheumatica
ctaccataggtggcaaagcactccaaatgtacacttgcagattctccaaatagagggtttacaaacttctcaatcaaaagaaaggtccaactctgtgagatgaatgcacacatcacatagaagttgctcagaatacttgtgtctagtttttatgtgaagatatttcattttccaccata

SEQ ID NO: 7826 - DNA, 127 bp, Protomyxzoa rheumatica
caataaagaaatatgtcacaaagcccctttggcacagcataaacaagagttacataacccgggttatcggtgcagagtgatgtcacaacgcccactgtaggcagagcctagaaaagagttacatcac

SEQ ID NO: 7827 - DNA, 189 bp, Protomyxzoa rheumatica
ctatcttttgattgagcagttttgaatctctctttttgcataatctgtgagtggatatttggagagatttgaggcctattgtggaaaaggaaatatcttcacagtgaaactacacagaagcattctgagaaacttcatggtgatgtgcacattcatctcacagagatgaatctttcttttcatttagca

SEQ ID NO: 7828 - DNA, 151 bp, Protomyxzoa rheumatica
ccaccatagggcgaaatggggctccaaatatccacttgcagattctacaaaaagaaattctaagctgctcaatcaaaagataggttccacactgttagttgaatgcacacttcccaaagaagtttctcagaatgcttctgtgtagttttta

SEQ ID NO: 7829 - DNA, 142 bp, Protomyxzoa rheumatica
gcatcatcatctaatggaatcgaatggaatcatggaaaggactagaatggaatcatcattcaatggaatcgaagggaatcattgaaaagagtcgaatgggatcatcatcgaatggaattgaatgcaatcatcatatggactc

SEQ ID NO: 7830 - DNA, 148 bp, Protomyxzoa rheumatica
ggctttgagatctattttggagaaggagatatcttcatataaaaactatacagaagcattctgagaaacacctttgtgagttgtgcactgaagtcacgttgttgaacgtatcttttgattcagcagttttgaatctctctttttacag

SEQ ID NO: 7831 - DNA, 129 bp, Protomyxzoa rheumatica
acttcagtccattttataccattccattccattccattttactccattcaattgcactctattgctttccactccactccatttaattctactctactccattccatttcactccactccactccattc

SEQ ID NO: 7832 - DNA, 143 bp, Protomyxzoa rheumatica
atttggagggttttgagtcctatggtggtaaatgaaatgtcgtcacgtgaaaaatacacagaggcattctgagaaaattctttgtgacgtgtggatccaccttccagagttgaacctatcgtttgattaagaagttttgaaac

SEQ ID NO: 7833 - DNA, 138 bp, Protomyxzoa rheumatica
tatttttaagtgaaaactagagagaagcattctcagaaatttctttgtgatgtgtgcattcaactaaccgagttgaaccttcttttgatggagcagtattgaaacactctttttgtagaatctgctagtggacatttg

SEQ ID NO: 7834 - DNA, 150 bp, Protomyxzoa rheumatica
tgctgctgtctgctttttataccttatcccgtttccaacggaatcctcaaatctagccaaatatccacttgcagactccacaaaaacagtgtttcaaaactgtactgtcaaaagaaatgttcaactctgttagctgaggacacacatcag

SEQ ID NO: 7835 - DNA, 185 bp, Protomyxzoa rheumatica
cactgcactgatcaccgagatgatgtaactcttgtataggtttcgccgactgggggcattgagacatatctctgtgctgatcaccgaggtgatgtaactcttgtctgggatctgcttacaggggtcattgtgacatatctcttccctgatcacccaggtgatgtaacgcttgtctaggctctgcc

SEQ ID NO: 7836 - DNA, 145 bp, Protomyxzoa rheumatica
catgaaaaggcatgttcagctctgtgagttgaatgcagacatcataaaaatttctgagaatgcttctgtctaattattatgtgaagatatttcctttccaccgtatgcctcaaagctctccaaatgtccacttgtagaatattca

SEQ ID NO: 7837 - DNA, 132 bp, Protomyxzoa rheumatica
cagattcaactcagttacttgaatgcacacatctcagtgacgttcctgagcatgactctgtctagttttttctgaagatatttccttttcctccaaaggcttaaaagcgctccaaaatgaacactcgcagat

SEQ ID NO: 7838 - DNA, 126 bp, Protomyxzoa rheumatica
tgcctacaggggacattatgacatatctctgcactgatcagccaggtgattcaactcttgtctaggttctgcctacagggtgtattgtgaaatatctgtgcactgatcacctaggtgatgtaactc

SEQ ID NO: 7839 - DNA, 139 bp, Protomyxzoa rheumatica
tgtggattcatcacacacagttaaactttcgttttgatacaccaggttggaaacactctttctggagaatctgtgaaaggacatttgggagcccacagggtcctatggggataaattgaatatctctagagaaaaacta

SEQ ID NO: 7840 - DNA, 134 bp, Protomyxzoa rheumatica
tttccaacgaatgcttaaaagcagtaaaaatatccatttgcagattctacgaaaagagtgtctcaaaactgctctaagaaaaggtatgctcaactctgtgagtttaatgcaaacatcacaaagtagtttctgag

SEQ ID NO: 7841 - DNA, 127 bp, Protomyxzoa rheumatica
aatgtttcagtgtagtttttatgtgaaattatttcgttttccaaaataggcctcaaagccctccaaacatcctcttgcagattctacaaaacagtgtttcaaaactcctcaatcaaaagaaagtttc

SEQ ID NO: 7842 - DNA, 163 bp, Protomyxzoa rheumatica
gattacaatccattcgattgcattccattcaaatcaattacatttcaatgccataaattgtagtctgttctattccagtccattccattcctgtccattccctttcgattccattccatactattgcattcaattcgattccattctcttcgaataaattcca

SEQ ID NO: 7843 - DNA, 133 bp, Protomyxzoa rheumatica
tgtcacagagttaaacctttcttttgattgagcagttttcaaactctcttttgtagaacctgcaagtggagattaagagccctttgtggcctatggtagaaaaaaaatatcttcacataaaaactagacagag

SEQ ID NO: 7844 - DNA, 144 bp, Protomyxzoa rheumatica
gtaactcttgtataggcttcgccgacagggggcattgagagataactctgcactgatcaccgagatgatgcaactcttgtctgggatctgtttacagggggcattgtgacacatttctacactgatcacccaggtgatgtaacc

SEQ ID NO: 7845 - DNA, 210 bp, Protomyxzoa rheumatica
attctcagaaactgttttgtgatgtgcgcattcaactcacagtgttaaaccttctttttgatagagcagttttgaaattctctttttgtagaatttccaactggatatttagagcagtttgaggcctatgctagaaaaggaaatattttcatagaaaaactagacagaatcattctccgaaactatttctgatgtgtgcattcagctgac

SEQ ID NO: 7846 - DNA, 168 bp, Protomyxzoa rheumatica
tacatcacctcagcgatcagtgcagagatatgtcccaatgtccctccaggcagagcttagacaagagtcacatctcctgtgtgatcagtgcagaggtaagtcacaatgcccccataggcagatcctacacaagagttacataacccgggtgatccgtgcagagtgatg

SEQ ID NO: 7847 - DNA, 233 bp, Protomyxzoa rheumatica
atttggggtacttttatattttatgtacagtatacaatatgtatcttggctactttgatattttatgtagagtttacaatatatattttgggtactttgataatttatgtacagtatgtaatacacagtttgggtacttttgtattttatgtagagtttattataaatggttgcgtaccttcatattttatgtacagtatataatacatattttgggaactttgctattttat

SEQ ID NO: 7848 - DNA, 200 bp, Protomyxzoa rheumatica
ccattaaagtcatttgatgattccattagattccagtcgatgatgattctgatcaattccatttgatgattccatttgattccatttgatgatgattccattcgagtccatttgatgattctattcaaatccattagatgattgcttttgattatattcaatgatgattccattcgagtccattcaatgattccattaga

SEQ ID NO: 7849 - DNA, 125 bp, Protomyxzoa rheumatica
ggaatggaatcaacccgagtgcaatggaatggattggaatggaatgtagtggaacaacccgaatgtaatgtaatgtaatgcagagtaagggagttgaatggaatcaatccgaatgtaatggaatg

SEQ ID NO: 7850 - DNA, 137 bp, Protomyxzoa rheumatica
agaatctgcaagtggatattttgaccgctttgaggccttcgttggaaacaggtatatcttcacataaaaactagaaagaaggattctcagaaatttatttgttgtgtgtgcattcaactcagagaatagaaccttta

SEQ ID NO: 7851 - DNA, 147 bp, Protomyxzoa rheumatica
ttaggctctgccaatgggggcattgtgacttatctctgccctgatcacacaggagatgtgactcttttctaagctttgcctagaggaacattgggacatatccctgcactgatcgctgaggtgatgtaaaagttgtctaggctttgc

SEQ ID NO: 7852 - DNA, 140 bp, Protomyxzoa rheumatica
gagttcattcaattcagatagttgaacatttcttttgatagagcagttttgaaacaaactttctgtagaatctgcaagtggctatttggaacacactgaagcctatggtggaaaaggaaatatcttcacataaaagctag

SEQ ID NO: 7853 - DNA, 174 bp, Protomyxzoa rheumatica
cttttggaggccaaggcaagaggatcacaaggtgaggagatcaagacgatcctggccaatacagtgaaacgctgccactacagaaaatccaaaaaattagctaggcatggtggcaactggtatagtcccagtgcggtgtagtcccagctacctgggaggctgagggaggacaat

SEQ ID NO: 7854 - DNA, 123 bp, Protomyxzoa rheumatica
acaaaaagagtctttcaaaactgctgtattaaaatgaatgttcaaatctgtgagttgaatgcaagcatcacaaaaatttctgagaatgcttgtctagtttttatgtgaagatatttccgtttc

SEQ ID NO: 7855 - DNA, 175 bp, Protomyxzoa rheumatica
ttgaaacactctttttgtagaatctgcaagtggacatttgctgcgctttggggccaaagttggaaaaggaagtatcttcacttaaaaactagacagaagccttctgacaaacttctttgtgatgtgggcattcacctcacagatttgaaccttgcttttcattgagcagctttga

SEQ ID NO: 7856 - DNA, 125 bp, Protomyxzoa rheumatica
cactctttttgtagaatctgcaaatgggtatttggagtgctttgaggcctatggtcaaaaaagaaataccttcacataaaaactagacagatgcattctgtgaaacttctttgtgatgtgtgcat

SEQ ID NO: 7857 - DNA, 141 bp, Protomyxzoa rheumatica
actttgaactctgtgagatgaatgcacacatcacaaagtagtttttcagaattcttctgtctagtttttttgtgaagatattttcttttccaccataggtatcaaatcgctctaaacatccacttgcagattctacaaaaa

SEQ ID NO: 7858 - DNA, 130 bp, Protomyxzoa rheumatica
ctctgagatgaatgcacacatcacaaagaagtttctgtgaatgcttctgtgtaatttctatgtgaagacatttctttgccacaataggcctcgaagctctccaagtatacacttgcagattttacaaaga

SEQ ID NO: 7859 - DNA, 146 bp, Protomyxzoa rheumatica
attctgagcaacttctctgtgatgtgtgcattcatctcacagaagtgaacctcttttttgattgagctgtttggaaacattctttttgtggaatctacaagtggatatttggaacgctttggggcctgtggtagaaaaggaaatat

SEQ ID NO: 7860 - DNA, 127 bp, Protomyxzoa rheumatica
aaaggaatgctcaactctgtgagttgaaagcaaatatcacagagaagtttctgagaatgctctgtgtagttttcatgtgaagatatttactttttcactccaggcctcgaggagctccaaatgtcca

SEQ ID NO: 7861 - DNA, 161 bp, Protomyxzoa rheumatica
tcaattcaattctattcgataccattccattctaacccattccactcgattgcattccatttgagcaaattccattggagacaattccatacgaatcctttcaattccataccgttcacgtccattcctttcaaatccattccattcgagtccattccatt

SEQ ID NO: 7862 - DNA, 180 bp, Protomyxzoa rheumatica
cttttgatagagcagttttgaaacactctttttttggaatgtgaaagtggatatttggaccgctttgtggccttcattggaaacgggaatatcttcacataaaaattagacagagatattctcagaaacttctttgtgatgtctgcattcaactcacagatttgaaccttccttttgata

SEQ ID NO: 7863 - DNA, 201 bp, Protomyxzoa rheumatica
gaagatatatccttttctaccatagaccacaaaacgctcccaatatccccttgcagtttctactaaaagagtgcttccaaagtgctcaatcaaaagaaagtttcaactctgtgagatgaatgcacacatcattaagaagtttctcagtaattttctgtctagtttttatgtgaagatatttcctttcctactataggcctg

SEQ ID NO: 7864 - DNA, 141 bp, Protomyxzoa rheumatica
aagtacatcaaatatagattatatactgtacataaaatattaaagtacccaaatatattttatatactgtacatgtaatatcaaagttcacaaacaatattttatatactgtacataaaatatcaatgtacacaaggtata

SEQ ID NO: 7865 - DNA, 129 bp, Protomyxzoa rheumatica
acctgggtgaaccgtgcagagtgatgtcacaacgccctctgtagacagaggctagaaaagagttacatcacctgcgtgatcagtgaagggatatgtcacaatgccccctgtacaaaaatcctggaaatg

SEQ ID NO: 7866 - DNA, 132 bp, Protomyxzoa rheumatica
gtgatgtgtgctttcatctcacagagttaaaaatttctttttattgagcagtttggaaacagtcttttgtagaatctgcaaatcgatatttggatcactctgaggcctattgttagaagggaagtatcttca

SEQ ID NO: 7867 - DNA, 125 bp, Protomyxzoa rheumatica
aaatattcagaagaccggaggagtgttctggaatcctatgtgacgaagaataattcagaacctcgtagcagtgttctctaatcctatgtgatggacaattttcagacgctcttagcaatattata

SEQ ID NO: 7868 - DNA, 230 bp, Protomyxzoa rheumatica
tgctcaatcaaatgaaaggttcacatttgtgagacgaatgaatacatcacaaagcagtttctcagaatgcttctgtgtaacttttatatgaagatatttgattttccacattaggcctcaaagcgctccaaatatccacttgcagattctagaaaaagagtgtttcaaaactgccctatcaaaagaaacgtccaacactgtgagatgaatgcacacatcacaaagaagtt

SEQ ID NO: 7869 - DNA, 161 bp, Protomyxzoa rheumatica
agaagcaatctgagaaacttctttgtgaagtgggcattcatctgacagtgttaaacttttcttttgattgagcagtttggaaactctctttttgtagaacctgcaaatggacatttggagaactttgagtcctatgatggaaaaagaaatattctcacata

SEQ ID NO: 7870 - DNA, 132 bp, Protomyxzoa rheumatica
gcagattctacaaaaagggtgtttcaaaactgactatcaaaagaaaggttaaactctgtgagttgaatgcatacatcacaaagtaatttttgataatgattctgtctagttcttctatgaagatatttcctt

SEQ ID NO: 7871 - DNA, 133 bp, Protomyxzoa rheumatica
tgcatgatttaatgcaatttcatttgatgattattacattcaattctattcgatgattccattcaattccatttggtgatgattcgattcgagtccattcgatgattccattcaagtacatttgattattccg

SEQ ID NO: 7872 - DNA, 127 bp, Protomyxzoa rheumatica
tacaaaaagagtgttttcaaactgctcaatcaaaaatagttcaactctgtgagatgaatgtatgcatcacaaaaaagtttctcagaattcttctgtctatttttaatgtgaagatatttcattttcc

SEQ ID NO: 7873 - DNA, 123 bp, Protomyxzoa rheumatica
acatatcactgcactgatcacccaggtgacgtaactcttgtctaggctctgctttcaggtggtattgtgacatatccctgcattgatcacctaagtgatgtaacacttgtgtaggctctgcct

SEQ ID NO: 7874 - DNA, 130 bp, Protomyxzoa rheumatica
tgtctatgaatttttctggaacctctgaaaactcttttagtttttccttgcatatggctaattcgggtatagaaaagtgtacatatacctatatagtgtggggaaaagaaagatagatcagactgttact

SEQ ID NO: 7875 - DNA, 143 bp, Protomyxzoa rheumatica
catcacctaggtgatcagtgcagagatttgtcaaaattccatgtaggcctgcttataaaagtgttacatcacctatgtgatcagtgcagagatatgtcacaaagccatcgtaggtagagcctagaaaaaagttacatgaccta

SEQ ID NO: 7876 - DNA, 150 bp, Protomyxzoa rheumatica
attccactccactccactccactcaattccattccattcctttcctttctttggacaggatctcactctgtcacccaggctggagtccattggcacaaactcagctcacatttcatatcaccattccattccattgcattccattccatt

SEQ ID NO: 7877 - DNA, 127 bp, Protomyxzoa rheumatica
actaaaagcaaatgtaaacctcaaaaagaagtttgtgataatgtttctgtccagtttttatgtgaatttatttccttttctactataggcctcaaagctctgcaaatatgcacttgcagattttaca

SEQ ID NO: 7878 - DNA, 151 bp, Protomyxzoa rheumatica
aatgcaatggaatggaatggaatggtaaaatgaaatgtgaactgagtttgtgccacttaacgccagcctgggtgacagagacagatcctgtcaaaagaaaggaatggaatggggtggagtgtagtgtagtggtttggagttcaatggagtg

SEQ ID NO: 7879 - DNA, 126 bp, Protomyxzoa rheumatica
agctttgaggatttcgttggaaacgggattacatataaaaaacagtcagcagcattctcagaaagttctttgtgatgattgcattcaagtcaccgaattgaacattccctttcacagagcaggttt

SEQ ID NO: 7880 - DNA, 183 bp, Protomyxzoa rheumatica
tcacaatacccctgtaggcagatcctagacaagagttgaatcagttgggtgatcagtgcagagatatgtcacaaagccccctgtatgcaaagcctagaccatatttacatcacttacttggttgacctgtggcgagatctctcacaattcccctgtaggcagggcttatacaacagttacatc

SEQ ID NO: 7881 - DNA, 214 bp, Protomyxzoa rheumatica
gggtggaatggaatggaatggagtggagtggaatcgagtggaatggaatggaatggtgaaatgtaatgtcagctaagattgtgccactgcactccagtctgggtgacacagtgagatccaaacgaaataaaggaatggaatggaatggaatggaatggaatggagtaaagaggaatggaatgaagtggaatagaatggagtggagtggaatgga

SEQ ID NO: 7882 - DNA, 183 bp, Protomyxzoa rheumatica
tctctttttgtagaatcttcaagtggatatttttagcactttgaggcctatggtggaaaagaaaacatcttcacataaaaactagtcagaagctttctgagaaacttctttgtgatgtatgcattcaactcatggagttgaacctttctcttgattgagcagtttgggaacagtctttttgta

SEQ ID NO: 7883 - DNA, 124 bp, Protomyxzoa rheumatica
cccttccattccactcgggttgattccattactttccattgcactcgaatacattcccttcctttccactcggaatgattccattccatttcattccactccaattgggttgaatccattccat

SEQ ID NO: 7884 - DNA, 265 bp, Protomyxzoa rheumatica
ttttgtcgtatctggaagtggacatttggagcactttgacacctttggtgaaaaaggaaatgtcttcccgtcaaaactagacagaagcattctaagaaacatttttgagatatatgtactcaactaacagagttgaaccttcctctttatagatcagttttggaaagctctttatgtggaatctgcaagtggatattcggatagctctgaggatttcgctggagacgggaatacataaagaaagtagacagcagcattctcggga

SEQ ID NO: 7885 - DNA, 134 bp, Protomyxzoa rheumatica
gaaccaaaagaaaggttcaactctgtgagatgaaagcacacatctcaaagaaatttctcagaaagcttctgtctggtttttatgagaagatgtttcctatttcaccataggcctcaatgggctgaaaaatatcc

SEQ ID NO: 7886 - DNA, 167 bp, Protomyxzoa rheumatica
aaaaggaaatatcttcacataaaatctagacagaagcaatatgagaaactactttttgatgtgtgttttcacctcacagatttaaagctttcttttgattgagcagttttgaaactctgtttttgtagaatctgaaattggacatttggagcattttgcggcctgtg

SEQ ID NO: 7887 - DNA, 247 bp, Protomyxzoa rheumatica
tacccaaggtatatattctatactgtacaaaacatatcaaagtacccaaaccatttattatatactgtacataaaatatgaaactacatcaaatatatattttattctggacaaaaaatatcaaagtacaccagacatattttctatagtgtacataaaatatcaaggtacccaaaccatgtattatatactgtacataaaatatgaaattacaacaaatatatattttattctgtacataaaatat

SEQ ID NO: 7888 - DNA, 132 bp, Protomyxzoa rheumatica
tgaagtctgtgagtttaaggcacacatctcaaagaactttgtgagaatgcttggttctcctttttttgggaagataccagctgccaacgaattcctgaaagagttccaaatatccacaagcagattctacaa

SEQ ID NO: 7889 - DNA, 206 bp, Protomyxzoa rheumatica
caaccacatgcagattttacaaaaagaaagtttcaaaactactcaatcaaaagaaaggttccactctatgagatgaatacacacatcacaacgaagtttctcagaatgcttccatgttgtttttatgtgaagctatttccttttccaccataggcctctaagcgcaccaaatatccacttgcagattctacaaaaaaagtgtttca

SEQ ID NO: 7890 - DNA, 129 bp, Protomyxzoa rheumatica
aaaaagagagtttcagaactgctctatcaaaagaaaggttcaactctgtgagatggatgcacacatcccaaagaaatttctcagattgcttttgtctagatttcatgtgaagatatttccttttatacc

SEQ ID NO: 7891 - DNA, 125 bp, Protomyxzoa rheumatica
cagtgttgaatattccctttcttagagcaagtttgaaaccgtattttcgtggaatctgcaggaggatatttggatagcttcgaggatttcgctggaaacgggattacatataaaaagtagacagc

SEQ ID NO: 7892 - DNA, 210 bp, Protomyxzoa rheumatica
cagtggaatggaatggaatgaaatggaacagaatgcaatggaatggaaaggagtggaatggaacggaacggagtggagttgagtggagttgagtggattggatcggatttcagtgcaatggaatgcaattgaatggaatggaaaggaatggtgaaatgaaatgtgtgctaagattgtgccacagtgttcgagtctgggtgacagagtgag

SEQ ID NO: 7893 - DNA, 158 bp, Protomyxzoa rheumatica
cagagtttaacctttcttttgatagagcagttttgaaacaaatttttgtaatatctgcaagtaaatatttggacttttttgaggccatcattggaaacgggatttcatcatataaaatttgacagaagaattctcagaaacttctttgtgatgtgtgc

SEQ ID NO: 7894 - DNA, 227 bp, Protomyxzoa rheumatica
cattccatttgattcaatttgattcgattccattccattcgtatccattccatacaattccattccattcgagtctgttgcattcaactccattattttctagtccattccaatccatttcaatccattccattccaataaataccattgcatttcattccgttccattacattccattgaattcctttgcagtcgagtgtattctattcgagtccattccattcaa

SEQ ID NO: 7895 - DNA, 122 bp, Protomyxzoa rheumatica
ccattccatttgattttattccatttgagtccattctattcgagtccactccattccattgcattccattctatttgatgccattccattcggttgtattccatttgactgcattccaatcc

SEQ ID NO: 7896 - DNA, 141 bp, Protomyxzoa rheumatica
agttgaacctttctttttacagagcagatttgaaacactctctttgtagaatctgcaactggacatttggagccctttggggcctatagtgaaaaacgaagtatcttcacataaaaactagacagaagcattctcacaaac

SEQ ID NO: 7897 - DNA, 124 bp, Protomyxzoa rheumatica
actacaaaaagagttcttcaaagctgctctcttaaagggagtgttcacctctatgagttgaatgcaaacatcacaaagacgtatctgagaacgcttctgtctagattttatatgaagatattcc

SEQ ID NO: 7898 - DNA, 122 bp, Protomyxzoa rheumatica
agttgaaagcaaatctcccaaagaagtttctgagaacgcttctctctagattttaagtgaagacatttcctttcccaccacaggcctcaaagcacacaaaatgtccacttgcagattctaca

SEQ ID NO: 7899 - DNA, 209 bp, Protomyxzoa rheumatica
ttctgtccagtttttatgggaagatatttcctttttcaccttagccctgaaagcactccaaatgtccacttccagataccacaaaaggggagtttcaagactgctctatgaaagggagtgttcaacttttgacttgaatgcgaacatcagaaagaagtttctcagaacgctgctgtgtgctttttatatgtattcccgcttccagcgaa

SEQ ID NO: 7900 - DNA, 162 bp, Protomyxzoa rheumatica
gcattcatctcacagagatgaatctttctttttcatttagcagtttttaaacactctgtttgtagaatctgcaagtggataattggagcactttgaggcaaatagttgaaaagaaaatatcttcacatgaaatctacacagaagcattccgagaaacctctt

SEQ ID NO: 7901 - DNA, 141 bp, Protomyxzoa rheumatica
tgctacgagggtctgaatgtttgtcccacacgtaggattccagaacaccccagctgtgttctgaatgattgtcccttacatagaattccagaacactgctgctgtggcctgaatgtttgttcctcacataggattccagaa

SEQ ID NO: 7902 - DNA, 169 bp, Protomyxzoa rheumatica
gaaacattctgagaaacttctttgtgatgtgtgcattcaattcacaggggagagcctatcttttgattgagccgttttgaatctctctttttgtagaatctgcaagtgggttttagtagccctttgtggcccatggtggaaaagaaaatatcttcaaataaaaactaca

SEQ ID NO: 7903 - DNA, 334 bp, Protomyxzoa rheumatica
gaggacacacatcagaaactagtttctgagaatgcttctgtctagtttttctatgaagctattccctttactaccataggcctcaaagcgctccaaatctccacttgcacattccacaacaagagtgtttccaaactgctctatcaataggaatgttcaactctgtgaggtgaatgcaatcatcacaaagcagtttctgagaatgcttctatctagtatttaggtgaagatatttccttttccaccacaaaccacaaagccctccaaacgtccacttgcagattctagaaaaagagtgtttcatagctgctctttccaaaggaaagttcaactc

SEQ ID NO: 7904 - DNA, 148 bp, Protomyxzoa rheumatica
ggaaaagcaattatcttcaaataaaaactgcacagaagcactcagagaaacttctttgtgatgaatgcattcatcacacagagttgaacctttgttttgatttagcagtttgagacaatctttccgtagaatcttgaagtgaatattt

SEQ ID NO: 7905 - DNA, 177 bp, Protomyxzoa rheumatica
ctatggtgaaaaaggaaatatcttcccataaaaactagacggaagccttctcagaaacttgtttgagatgtgtgtattcaactaagagcgttgaacatttctttttacagagcagttttaaaacactcttttggtgcaatctgaaagtggataattggatagctttgtggatttcgt

SEQ ID NO: 7906 - DNA, 134 bp, Protomyxzoa rheumatica
tattatatactgtacataaaatatcaaaatgctcaaactatgtattatatactgtacataaaatatgaaagcacccgaacatttataaaaaactgtacattaaatatcaaagtactcaaacgatacactgtaca

SEQ ID NO: 7907 - DNA, 266 bp, Protomyxzoa rheumatica
gagttgaaccttccttttgagagagcagttttgaaacagtctttttgtaacgtctgcaggtggatatttggagcgattcgtgtagtatgatggaaaaggaaatatcttcacatacaaactaaacagaagcattctcagaaacttcttgtgatgtgtgcattcacctaacagagtggaaccgttcttttgatagagcagttttgaatcagtcttttggtaggacctgcaagttttcatttggagcgctttgaagcccatggtggaaa

SEQ ID NO: 7908 - DNA, 155 bp, Protomyxzoa rheumatica
ctttctttggtacagcagttttaaaacactctttttggagattctgaaagtagatatttggagagacttgaggactacggtggaaaaggaaatatcttcacaaaaaaactagacagaaacattctgagaagcttctttgtgatgtgtgcgtccat

SEQ ID NO: 7909 - DNA, 81 bp, Protomyxzoa rheumatica
gaaacattctgagaagcttctttgtgatgtgtgcgtccatctcgaagagttgaacctttcttttgattgagcatttttgaa

SEQ ID NO: 7910 - DNA, 216 bp, Protomyxzoa rheumatica
aagatatttcccttttcactgtaggtgtcaaggcgctccaaatgtccacttccacatactacaaaaagagtgtttcaaacctactctatgatagggaatgttgaaacctatgagttgaatgcaagcattacaaagaggtttctgagaatgcttctgtctagattttatatgtagatattcccgtttccaacgaaatcctcaaagctatccaaatat

SEQ ID NO: 7911 - DNA, 177 bp, Protomyxzoa rheumatica
acaaagaagtttctcagaatgcttctgtctggcttttatgtgaagatattttctttctcaccataggcctcaaagctctccaaatgtccacttgccgattcttcaaaaagagtgtttcaagactgctctatgaaaagaaaggttcaagtctgtgagttgaatgcccacatcacaaag

SEQ ID NO: 7912 - DNA, 157 bp, Protomyxzoa rheumatica
gtgtatattcatctcacagagttgaaactttattttgattgagcagatttgaaacactggctttgtagtatctgcaagtggatatttggagtgatttgaggtctatggtgtaaaaggaaatatcttcacataaaaactacacggaagcattctgaga

SEQ ID NO: 7913 - DNA, 207 bp, Protomyxzoa rheumatica
tttggaaaatgaaatatcttcaaagtaaaactacacagaaccattctgagaaacttctttatgatgtgtgcattcaactctcagagttgaacctaccttatgattgagcaatttggaaacactctttttgtagagcctgcaagtggatatttagaacgatttgaggcctattgtggaaaagcaaatatcttcacataaaaactacac

SEQ ID NO: 7914 - DNA, 193 bp, Protomyxzoa rheumatica
tctgcaagaggatatttggatagctttgaggatttcgttgcaaacgggaatggcttcatataaactctagacagaagcattctcagaaacttcgttgggatgtttcgattgaagtcccagtgttgaacattcccttttatagcgcaggttggaaacactctttttgcattccctggaagtggacatttggagc

SEQ ID NO: 7915 - DNA, 160 bp, Protomyxzoa rheumatica
aagaattctcagtaacttctttgtgttgtgtgtattcaactcacaggtttgaacctttctttacagagagcagatttgaaacattctttccgtggaatgtgctagtgcagatttcaaacgcttcgaggacaatggtagaaaaggatatatcttcgtatta

SEQ ID NO: 7916 - DNA, 131 bp, Protomyxzoa rheumatica
cttcgaggacaatggtagaaaaggatatatcttcgtattagaacgagagaaaatcattctcagaaaacagtttgtaatgtgtgcgttcaagtcacagagtttaacctttcttttaactgagcagtttggaa

SEQ ID NO: 7917 - DNA, 231 bp, Protomyxzoa rheumatica
aaatcttctgtctagtttttatgtgaagatatttccttttacaccataggcctcaaactgctccaaatatccacttgtggattctacaaaaagactttttcaaaactgctcaatcaaaggaaaggttcaactctgtgagttgaatgcacacaacacaaacaagtttctgagaatgctgctgtctagatttcatgtgcggatatttcgttttccaccataggcatcaaagcg

SEQ ID NO: 7918 - DNA, 314 bp, Protomyxzoa rheumatica
ctgcaaaaagagagattcaaaactgctcaatcaaaagatagtttctactccattagctgaaagaccacatcacaaaaaaagtttctcaggatgcttctgtgtagtttttatgtgaagatatttggttttccacagtaggcctcaaagcgctccaaatatccactcacagattctgcaaaaagagagattcaaaactgctgaatcaaaagacagtttcaactctgtgacttcagtgcacacctcacaaggatgtttctcagaatgcttctgtgtagtttttatataaagatatctccttctccaaaatggatctc

SEQ ID NO: 7919 - DNA, 341 bp, Protomyxzoa rheumatica
tagattttatatgaagctattcccgtttccaacgaaatctttagagctatccaactatccacttgcagattctataaaaagagtgtttccaacgtgctgtatcaaaagataggttgtacactgttagttgaggacacacattacaaagaagtttctgagaatgcctctgtctagattttacctgaagatattccggtttccggtgaaatccttaaagctctccacatatccactagcagatactccaaaagagtctttcaaaactgctctgtgaatagaaatgttcaactctgttagttgaagacatacgtcacaaagcagtttgtgagaatgcttctgtc

SEQ ID NO: 7920 - DNA, 208 bp, Protomyxzoa rheumatica
gaatagaatggaatggactcgaatgacatggactctaatggaatagaaatgaatggagtgacatcgaatggaatggattgcaatggaattgaatggaatggacccaaatataatggactcgaatggaatggactcaaatagaatggacatgaaaggaatggtctcgaatggaatttatttgaatagaatggaatcgaatgaaatacaa

SEQ ID NO: 7921 - DNA, 234 bp, Protomyxzoa rheumatica
ttcaggtctatagtgagaaaggatatatcttcaaataaaagctagacagaagcattctgataaacttgtttgtgaagtgtgaactcagctaacggaggtggatctttctttggtacagcagttttgaaaaacactttgttgaatctgcaaggggacatttggatagatttgaagattacgttggaaacgggaatatcttcatatcaaatctagacagaagcattctcagaaacg

SEQ ID NO: 7922 - DNA, 137 bp, Protomyxzoa rheumatica
ggaatgcaagggcatggaatggaatggagtcaactggaatagaatggaaaggaatggaatcaacaccagtggaatgaaatggaaaggagcggaatggacaggaaaggaatggaaaggaactgaatgtaatggaatct

SEQ ID NO: 7923 - DNA, 176 bp, Protomyxzoa rheumatica
ccattgcattccattccatttgaatacatcctattctattccattcgtttccattccattccatttcactggactccattccattagagtccattccattaaatttcattatattccattcgagtcatttcctttccgttgtagtccattccattccattcgagtccatttcactc

SEQ ID NO: 7924 - DNA, 156 bp, Protomyxzoa rheumatica
agaagtgtttcaatactgctctatcaaaagacgtattcaactcagttactttaatgcacacatctcaatgaagttcctgagaaagcttctgtctagtttttatgtgaaaatatttccttttccatcatgggcctcaaagcgctcaaaatgaacact

SEQ ID NO: 7925 - DNA, 139 bp, Protomyxzoa rheumatica
gagcagatttgaaacactgcttttgtagaatctgcttgcgtgtatttggaggtctttgaggaattgggcgtatacgggatatcttcacatacaaattacacagaagcattctcagaaactgctctgtgatgtgtgcatt

SEQ ID NO: 7926 - DNA, 184 bp, Protomyxzoa rheumatica
gaaggtttcgttggaaacgggaatatcttcatataaaatctagagagaagtattatcagaaacttccttgtgatggttgcattcaagtcacagagttgaacattcgctttcatagagcatgtttgaaacactctttttccattacctggaagtggacatttggagcgctttgaggcctatggtg

SEQ ID NO: 7927 - DNA, 139 bp, Protomyxzoa rheumatica
gagcagatttgaaacactgcttttgtagaatctgcttgcggatatttggcggtcttttaggaattgggcgtatacgggagatcttcacatacaagttacacagaagcattctcagaaactgctttgtgatgtgtgcatt

SEQ ID NO: 7928 - DNA, 811 bp, Protomyxzoa rheumatica
catcagaaagaaatttctgagaatgctgctgtctacctttaatttgaattcccgcttccaacgaaatcctccaagctatccaaatattcacttgcagattccacaaaaagagtgtttcaaaactactctatcaatagaaaggtacaactctgtcagttgaggacacacatcacaaacaagtttctgagaattcttcaattttttatgggaagacatttcctttttcaccgtaggcgtcaaagcgctccaaatgtccacatccagatagtacagaaagagtgtttcaaacctgctctatgaacgggaatgttcagctctgtgagttgaatgcaaacatcacaaagcaggttccgagaatgcttccgtctagattttaaatgaggatattcccgtttccaacgaaatcctcgaagctatccaaatatccacttgcaaatgccacaaaaagagtgtttccaaactgctctgtgaaaaggaaggttcaactctgttagttgagtacacacatcacaaagaggtttctgagaatgctgctgactagtttttatttgaagatatttcccttttcaccttaggcctaagagtgctcgaaatgtccatttccacatactccacaaagtgtgtttcaaacgtgctgtatgaaagggaatgctcaactctatgagttgaatgcaaacatcacaaagaagattctgagaatgcttttgtctagattttatatgaagatattcccgtgtccaacgaaattttcaaaggtctccaaatatccatttgtagattctacaaaaagagtgtttccaaactgctgtat

SEQ ID NO: 7929 - DNA, 147 bp, Protomyxzoa rheumatica
gtctagtttgtatgtgaagatatcccgtttacaacgaaatactcaaagagctccaaatatccacaagcagatcctataaatgcggtgtttcaaaactgctctatcataagaaaatttcaattctgtgaatttgacacacacttcaca

SEQ ID NO: 7930 - DNA, 371 bp, Protomyxzoa rheumatica
aaaagggatttcttcatataatgctagacagaggaattctcagtaacttctctgtgttgtgtgtattcaaatcacagagttgaacgttcctttagacagagcagacttgaaacactctttttgtggaatttgcaataggaaatttcaagcgctttgaggccaaaggcagaagaggaaatatcttcgtataaaaacaagtcagaatcattctcagaaactgcttaatcatgtgtgcgttcgactcacggagtttaacctaccttttcatacagcagtttggaaacactctgtttgtaaagtctgcacgtggatatttggacatctttgaggccttcgttggaaacgggttttattcatgtaaggctagacag

SEQ ID NO: 7931 - DNA, 725 bp, Protomyxzoa rheumatica
gtgatgtgtgcattcaactcccagagttgaacctctctttcgatagagcagttctgaaacaatctttttgtggtatccggaagtggacgttgggagcgatttgaggcctatggtgaaaatggcaatatcttcacctaaaaactagacagaagcatcctcagaaactgctttgtgatatgtgtagtcaactcacggagttgaaacgtggttttgatgcagcagttttgaaacactctttttgttagaatcttcaagtggatatttggatagctttgaggctttcattggaaacgggaatatctacacataagaactagacagaagcattctcagaaagttctttatgaagttcgcattcaactcacagagttgtaccttccttttcacacagcagttttgagacattctttttgtagaatctgcaagtggacatttggagtgatttgagacatagggtgaaaaaggaatatcttctcataaaaagtagacagaagcattctcagaaacgagtttctgatttgtgtactcaactcacagagttaaacctttcctttgatacagcagtttggaaacactcttcttgtagaatttacaagcggatataaggacagcagtgaggaattcatcggaaacggaatatcttcacataaaagtagacagaagcattctcagaaagttctgtgtaatgtgtgcattcaactcacagagttgaaactttcttttga

SEQ ID NO: 7932 - DNA, 209 bp, Protomyxzoa rheumatica
cagcagcatcctcagaaacttctttgtgatgtgtgcattcgagtcacagagttgaacattccctttcgtacagcagttttgaaacactctttctgaagtatctggaagtgaactttaggagagctttcatgtctatagtgagaaaggctatatcttcaaataaaaaatagacagaagaattctgataaacttgtttgtgaagtgtgaac

SEQ ID NO: 7933 - DNA, 121 bp, Protomyxzoa rheumatica
tttctgagaatgcttctgtctagtttgtatgtgaagatataacattgacagcgaattcgtcaaagagcttcaaatatccaaaagcagattctagaaaagcagtgtttcaaaactgctcaat

SEQ ID NO: 7934 - DNA, 275 bp, Protomyxzoa rheumatica
acagagcagatttgaaacactctttttgtggaatttgcaggtggagatttcaagcgctttgaggccaaaggcagaaaaggaaatatcttcgtataaaaactagatagatcattctcagaaactgctttgtgatgtgtgcgttcaactcacagagtttcacttatcttttcgtacagcagcttggaaacactctgtttgtaatgtctgcaagtggatattttgacctcttttaggtcttcgttggaaacgggttttattcatgtaaggctagacag

SEQ ID NO: 7935 - DNA, 189 bp, Protomyxzoa rheumatica
atatccacttgcaggttctacaaaatgagtgtttcaaaactgctcaatcattggataggttcaactctgtgagatgaatgcacacgtcacaaagaagttttccggaacgcttctatagagtttttatttgaaggtatttccttttccaccataggttgcaaggggctccaaatatccacttgcagattc

SEQ ID NO: 7936 - DNA, 143 bp, Protomyxzoa rheumatica
cttgtctatgctctgcctacaggattctttatgatttatagtggcactgataacctaggttatgtaacacttgtcgaggctctgcctacacgggaattctcacatatctctgctctgatcacccaggtgacggactcttgtct

SEQ ID NO: 7937 - DNA, 238 bp, Protomyxzoa rheumatica
tcaaatatatattatattaggtacataaaatatgaaagtacataaaatatagatgatatactgtacataaaatatcaaagtagcccaaatatatattatacagtgtacatgaaatatcaaaatttacaaaatatatattatataatgtacataaaatatcaaagtacccaaagcaagtattatttactgtacataaaaatgaaagtacatcaaatatatattttattctgtacataaa

SEQ ID NO: 7938 - DNA, 143 bp, Protomyxzoa rheumatica
aggcctgtaatcccagcaaatttggaggccaaggcaaggggatcaccaggtgaagagatcaagaccatcctggccaatacagtgaaacgctgtcactaatgaaatcccaaaaaattagctaggtatggtggcagctggtgtag

SEQ ID NO: 7939 - DNA, 129 bp, Protomyxzoa rheumatica
ctgtggtggaaaaggaactatcctcaaataaaaactacacagaagtattccgagaaacttccttgtgatgtgtgcattcatctcacagggttgaacctttggtttgattgagcagttttgagacaatct

SEQ ID NO: 7940 - DNA, 130 bp, Protomyxzoa rheumatica
tttggaaagctttgaggcctattgtggaaagggaaatatcctcaaataaaaactacccagaagcactctgtgaaacttctttgtgatgtgtgcattcaactcacagtgttgaacctatgttttgattgag

SEQ ID NO: 7941 - DNA, 140 bp, Protomyxzoa rheumatica
gacagagcagctctgaaaccctctttttctagaatctgcaagtggatatttggagggctttgaggcctgtggtggaaagggaattctcttccagtaaaaactagatagaagcattctcagaaactactttgtgatgattg

SEQ ID NO: 7942 - DNA, 153 bp, Protomyxzoa rheumatica
tgtttttatctgaagatgtttcctttttaaccatacgcttcaataggctcccaaatatcccttcacagattctacaaaaacagtgtgtccaaactgctgaatgaaaagaaatgtggaactctgagagacgaatgcacacatcagaaagcagtt

SEQ ID NO: 7943 - DNA, 212 bp, Protomyxzoa rheumatica
tagcttttatgggaagattatcccttttccatcgaaatcttcaaagaggtccaagtatccgcttgcaggtccctctgaaagagtgtttccaagctgctgtatcaaaaggagccttccactccgtgagttgaatgcagtcatcacaaagaagaagtctctgacaatgcttctctctagtttttatgtgaagatatttccttttccaccacagg

SEQ ID NO: 7944 - DNA, 152 bp, Protomyxzoa rheumatica
attgtcccaaagctctaaaatatccacttgcagaccctctaaaagagtgtttcagaattgctcaatcaaaggaaaggttcaattctgtgtgaccaatgcactcatcacagagaagtttgtctgaatgcttctgtgtagaatggatttgaaga

SEQ ID NO: 7945 - DNA, 144 bp, Protomyxzoa rheumatica
tggatttgaagataattccttttccaccacagtccgcaaagggctaaaaatatccatttgcagattccacaaaaagagagattcagaactgctcaatcacaagataggttcaacttggtaatttgaaagcccacatgacaaaca

SEQ ID NO: 7946 - DNA, 135 bp, Protomyxzoa rheumatica
atatttccctttccacaataggcctcaaagctttccaaatgtccacttgcagattccaccaaaagagtgtttcgaaactgctcaatcaaaagaaaggttctactctgtgggatgaatgcacacatcacaaagtag

SEQ ID NO: 7947 - DNA, 218 bp, Protomyxzoa rheumatica
aaaaggctacaaatatccacttgtagatcctaaaaaaatagtgtttcaaaactgctgtatcaaaagaaagattcaactctgtgagatggatgcacagatcacaaagaagtttctcataaagcttctgtgtagtttttatgtgaagatatttgtttttccacagcaggccccaatgaactccaaatatccacttgcagattctacaaaaagagtgtttc

SEQ ID NO: 7948 - DNA, 187 bp, Protomyxzoa rheumatica
agggctcacaaatatcccttcgcagattctaagaaaagacgttttccaaactcctcaaccaaaagaaaggtttaactctgtgagatgaatggacacatcacgaagaagtttctcagaaagcttctgtctagtttttctgtgaagatatttctttttcaccataggcctcaagcagctaagaaatttc

SEQ ID NO: 7949 - DNA, 118 bp, Protomyxzoa rheumatica
aaactagaaagaagccttctcagaaactcctttgagatgtttgtgtccaattcacaaagttgaacctttcttttgatagagcagatttgaaacactgcttttgtagaatctgcttgcg

SEQ ID NO: 7950 - DNA, 103 bp, Protomyxzoa rheumatica
tgtttgtccctcacataggattccagaacactgctacgattatgtgaatgtttgctcctcacataggattccagaacactgctacgagggtctgaatatttgt

SEQ ID NO: 7951 - DNA, 140 bp, Protomyxzoa rheumatica
aatgccgtgtagccagagcctagactaaagttacagtacctgttagatcagtgcagagatatgtcacaatgtcccccgtaggcaaagcctaggctagagttgcatcacatgagtgatcattgaagagatatgtcacaatg

SEQ ID NO: 7952 - DNA, 147 bp, Protomyxzoa rheumatica
acataaattataaaagtaccccaaatatatattatatactgtacataaaataacaaagtacccataatacatattatacactgtacataaaatatcaaaggacccaaaatacacattatatactgtacataaaatatccaaatactc

SEQ ID NO: 7953 - DNA, 151 bp, Protomyxzoa rheumatica
tataccattgtcaaggctctgcctacagtggctttgcgatttatctctgcactgatcacctaggtcatgtaactcttgcctaggctctgcttacagtggcattgtgtcatatctctgcaatgatcacccaggtgatgtaactattttctag

SEQ ID NO: 7954 - DNA, 230 bp, Protomyxzoa rheumatica
caaatatcttcacgtaaaaaccacacagaagcattctgagaaacatctctgtgatgtgtgcattcatcccacagagttgaaagtttcttttgattgagaacttttgaaacacactttttgtagaatctgcaagtggatatttgaagccctttgcagcctatggaggaaaaggaaatatcctgaaataaatactacacagaagcattctgagaaacttctttgtgatgtgt

SEQ ID NO: 7955 - DNA, 152 bp, Protomyxzoa rheumatica
ctgttctatcccagttcattcgattctggtgcattccattcgattccattccattcgataccattccatactattgcagtccattccattccattgttttcgaaacaattccaattgagaccattcctttcgtgtccattctatttgactcc

SEQ ID NO: 7956 - DNA, 243 bp, Protomyxzoa rheumatica
tgtagtttttatgtgaagatatttgtttttccacagtaggccccaaagagctccaaatattcacttgcagattctacaaaaagagtgttccaaaactgctcaatcatgaaataggatcaaccctgtgagatgaatgtacgtatgacagagaagtttctcagaatgcttctgtgtagtttttatgcgaagatatacgactttccacagtacgcctcaaagttctccaattatccactcgtagat

SEQ ID NO: 7957 - DNA, 81 bp, Protomyxzoa rheumatica
acagtacgcctcaaagttctccaattatccactcgtagattctgcaaaaagagagattcaaaactgctcaatcaaaagata

SEQ ID NO: 7958 - DNA, 81 bp, Protomyxzoa rheumatica
aagtggatatttggagcgctttggggcctactgtggaaaagcaaatatcttcacgtaaaaaccacacagaagcattctgag

SEQ ID NO: 7959 - DNA, 138 bp, Protomyxzoa rheumatica
aaattatgtattatatactgtacataaaatatccaagtacagaaattatgtgttatatactgcacataaaatatcaaagtacccaaactatatattatataccgtacataaaatatcaaagtacccaaagtgtgtatt

SEQ ID NO: 7960 - DNA, 142 bp, Protomyxzoa rheumatica
tcacataaaaagtagacagaagctttctgagaaacttctttgtgatgtgtccattcatcgcacagagtgaaacctttcttttgattgaggagtttggaaaatgtcttttcttagaatctgcgaagggatatttgtgagccct

SEQ ID NO: 7961 - DNA, 146 bp, Protomyxzoa rheumatica
ctttgaggcctatggtggaaaaggaaatatctccacataaaaactggacagaagcattctcagaatctcctctgtgatgtttgcattcaactcacagagttgaacataccttttcatagagcagttttgaaacactcttttcgtag

SEQ ID NO: 7962 - DNA, 253 bp, Protomyxzoa rheumatica
aggcctatggtggaaaaggaaatatcttcacataaaaacaggacagaagcattttcagaatctccgctgtgatgtttgcattgaactcacagagttgaacgtcccttttcatagagcagttttgaaacactcttcgtagaatctgccagtggatatttggactgatttgaggcctttgttggaaacgggaataccttcacataaaatctagaaagaagaattctcagaaacttctttgtgatatgtgcattca

SEQ ID NO: 7963 - DNA, 157 bp, Protomyxzoa rheumatica
aagcattctgagaaacttctttgtgatgtgtgcattcaaatcacagagctaaacctatcttttgattgaccagttttgaaactctcttttgtagaatctgcaaggggatatttggagtgctttgaggcctactgtagtaaaggaaataacttcatct

SEQ ID NO: 7964 - DNA, 127 bp, Protomyxzoa rheumatica
tctctcacataggactccagaacactcctgctgtggtctaaaagtttgtcactcacataggattccagaaaactgctgctgggttctcagtgtttgtcccttacatagaattctggaacattgctaa

SEQ ID NO: 7965 - DNA, 197 bp, Protomyxzoa rheumatica
cttgcagattctacaaaaagagtttttcaaaactgctctaccaaaaggaaggttaaactctgtgggttgaaggcacacatcacaaagtagtttctgaaaatcattctgtctagtttttctatgaagatattgccttttccaccataggcctcaaaccgcgctaaatatccacttggaaattctacaaaaagagagtt

SEQ ID NO: 7966 - DNA, 127 bp, Protomyxzoa rheumatica
gacgtatctctgcactgatctcccaggtgatgtaacatttctctgggccctgcctacaggggcgttttgacatagctctgcacagatcacctagtttatgtaactcttgaccactctgcctacaggg

SEQ ID NO: 7967 - DNA, 318 bp, Protomyxzoa rheumatica
tctcaaaactgctcaatcaaaccaaaggttcaactctgtgagatgaatgcccacatcacaaagaagtttctcagagtacttctgtgtagtttctatttgaggatagttccttttccaccacagaccagaaagggctccaaatatccattgcagatggtacaaaaagtgagattcaaaactgctcaatccaaaggtagtttcaaccatgtgatgtgaatgcacacagcacagagaattttctcaaaatgcgtctgtctagtttttatttgaagatatttccttttctaccataggccacaaacgtctccaaatatccac

SEQ ID NO: 7968 - DNA, 148 bp, Protomyxzoa rheumatica
gtgcattcatctcactgggttgaacctttcttttgattaagtagttttgaaacactctttttctagaatctgcaggtagatatatggaacactttgaggcctatggtggaaaaggaaacatcttcacataaaaactagacagaagcat

SEQ ID NO: 7969 - DNA, 411 bp, Protomyxzoa rheumatica
aagtggatatcttggcctcttagaggccttcgttggaaacgggttttttcatgtaaggttagacagaggaattcccagtaacttccttgtgttgtgtgcattcaactcacagagttgaatgattctttacacagagcagatttgagacactcttttggtggaatttgtaagtggagaattcagctgctttgaggtcaacggtagaaaaggaaatatcttcgtataaaaactagacagaatgattctcagaacctgcttcgtgatgtgtgtgttcagttcaaagagttttacctttcttttcatagagcagttaggaaacactctgtttgaacagtctgaaagtggatattccgatctctttgaggcctttgttggaaaagggatttcttcatataatgctagacagaggaa

SEQ ID NO: 7970 - DNA, 132 bp, Protomyxzoa rheumatica
tataagaagatgtttccttttctaccgtaggcctcaaagcgcttgaaatctccagctgccaattccacataaagggtgtttaacatctactcttctaaaggaaagttcaactctatgagttgaatacacaca

SEQ ID NO: 7971 - DNA, 325 bp, Protomyxzoa rheumatica
tgtaggcagagcctatacaagagttatatctcctggttgatcagtgcagttatatgtcactatgccgtgcagccagagcctagactaaagttacagcacctgggagatcaatgtagagatatgacacaatgtcccctgtagacaaagcctaggcaagagttgcatcacatggctgatcattgaagagatatgtcacaatgtcccctgtaggcaaagcctaggccagagttgcatcacctgggagatcagtgcagatatatgtccaatgtcccctctagggaaagcctaggcaagagttgcatcacatgggtgatcattgaagaga

SEQ ID NO: 7972 - DNA, 207 bp, Protomyxzoa rheumatica
gaacgcttctttctggtttttatgagaagatatttcctttctcaccaaaggcctcaaagcgctcgaaatgtccacttcctggtagtgcagaaagagtgtttcaaagctgctctctgaaaggaagtgttcaactccatgagctgaatgcaaacatcacagagaagttcctgagaatgcttctgtttgattttatatgaagaaattccc

SEQ ID NO: 7973 - DNA, 195 bp, Protomyxzoa rheumatica
tatcaaactacccaaagtatgtattatatactgtacataatataacaaagtacccaacgtatgtattatatgctgtacataaaatatcaaagtacacaaattatgtattatacactgtacacaaaatatcagagtacccaaagtaagtattatatactgtacataagatatcaaagtgcccaaagtatgtattat

SEQ ID NO: 7974 - DNA, 167 bp, Protomyxzoa rheumatica
aatagtgtggaatggacccaaatataatggactcgtatggaatggactcaaatagaatggacccaaaaggaatggactcgaatgcaatttattcaaaagaatggaatcgaatggaatgcaatagtatggaatagaatcaaatggaatggaatcgaatggaatggact

SEQ ID NO: 7975 - DNA, 422 bp, Protomyxzoa rheumatica
atttcctgtttccccagaggcatcaatgggctcacaaatattcctttgcatattctacaaaatgactgtttagaaggtgctcaatcaaaaaaaaagttcaacagtgtgagatgaatgcgcccattcaaaggaagtttctcagaattcttctatctagtttttatgtgaagatatttcctttttcactataggccacaaagtgctccaaatatccacttgcagactctacaaaacgagtgtatccacactgctcaatcaaaagaaaatttcaactgtgtgagatgaatgcacacatcaaaataaatttctccaaaacttctgcctactttttatgggaagatatttcgtttttcaacgtaggccaaaagcactccaaatatcaatttgcagattctacaaaaagactgtttccaaactgctca

SEQ ID NO: 7976 - DNA, 182 bp, Protomyxzoa rheumatica
acagtatataatatatagtttgagtactttgatattttatctccagtataaaatatatagatttcgtactttgatattttatgtacagaatatagtttttgtactttgatattttatgtacactttaatataaaattttgggtactttcatattttacgtacagtatataatacatactttg

SEQ ID NO: 7977 - DNA, 134 bp, Protomyxzoa rheumatica
tgaatgcagatatcaccaagtagtttctaatagtgcttctgtctagatttcagatgatgatattcccgtttccaacgaaatcgttagagctaagcaaatatccagttacagtttctaccaaaagggtgtttcca

SEQ ID NO: 7978 - DNA, 194 bp, Protomyxzoa rheumatica
ttatatactgtacctaaaatatgaaattacatcaaatatgtattatattaggtaaataaaatatgaaagtacaacaaatatagattatgtaatgtacataaaataccaaataaccccaaatatatattttatactgtacatgcaatatcaaagctcacaaactatatattatatactgtacataaaatatcaaa

SEQ ID NO: 7979 - DNA, 125 bp, Protomyxzoa rheumatica
tgtcatcagttcagggatatgtgaaaactcccctgtaggcagagactagacaggagttatatcacctagttgatcactgcagagttatttcacagtaaccctgtaggcagatcctagacaagagt

SEQ ID NO: 7980 - DNA, 106 bp, Protomyxzoa rheumatica
aatttgtcagaaagcttctgtctactttttatgtgaagatatttcatatttcaacaaaggccataaagggctcacaaatatcccttcgcagattctaagaaaagac

SEQ ID NO: 7981 - DNA, 217 bp, Protomyxzoa rheumatica
catatccctgcactgatcacccaggtgatctatctctggtctaagctctgcctaaaggggcattgtgacagatctctgcactgatcactctggtgatgtaagtattttctaggctctgcttcaaggggccttgtcacatatctctgcactgatcacccaggtgatgtaactcttgtctaggctctgcttccagggcatattgtgacatatctatgca

SEQ ID NO: 7982 - DNA, 135 bp, Protomyxzoa rheumatica
ttcaatgcaaacatcacaaagaagtttctcagaatgcttctgtgtagattttatgtgaagatgttttgttttctaccatagggcaaaatggggctccaaatatctacttgcattttctacaaaaagagagattct

SEQ ID NO: 7983 - DNA, 103 bp, Protomyxzoa rheumatica
ctttttccaccacaggcaacaaagctctccaaatgaacacttgcagattctataaaaagtgtgtttcaacactgctctatcaaaataaggtttcaagtctgta

SEQ ID NO: 7984 - DNA, 184 bp, Protomyxzoa rheumatica
aaaaagaagtttctcaaaatgcttctgtctagttttcatgtgaagatatttatttttcaccattggccccaaacggctcagaaatatccctttgcagtttgtaggaaaagactgtttccaaactgctcaatgaaaagaaatggtcaactattagagatgaatggaaatgtcacaaagagttttc

SEQ ID NO: 7985 - DNA, 130 bp, Protomyxzoa rheumatica
ctcaatcaaaacataggttcaacactgtgagttgaatgcatacatcgcaaagaagtttcacagagtacttctgggtggtttttatttgaagatatttccctttccacaataggcctcaaagctttccaaa

SEQ ID NO: 7986 - DNA, 381 bp, Protomyxzoa rheumatica
aattcctcaaagagctccaaatatccacaagcagattctacagaagcagtgtatcaaaactgctctatcaaaagaaaggttcaactctctgaatagaacaaacacatcactaaggcgtttctgagaatgcttctgtctagtatttatgtgaagatatttctttttccaccataggcaaaaaaacgctccaagtgaacacttgcacatcctacaaaatgtgtgtttcaacactgctctttcaagagaaaggttcaagtctgtgagttgaatgcacacatcactaagcagtttctgagaatgctgctgtctagtttgtatgcgaagatatcccgtttacaacgaattcctcaaagagctccaaatatccacaagcagattcta

SEQ ID NO: 7987 - DNA, 110 bp, Protomyxzoa rheumatica
tcaaatctgctctatctaaaagaaggttcaactctgtgagttgaatacacacaatacaaagaagttacgaagaattcctctgtctagcattatatgaagaaatccctttt

SEQ ID NO: 7988 - DNA, 122 bp, Protomyxzoa rheumatica
ttccattccatttcattccattccattccattgcattccaatctagttgattccattccattccactacattgaattacattccattcccctcgggttgattcaattccattccattccatt

SEQ ID NO: 7989 - DNA, 563 bp, Protomyxzoa rheumatica
tattttatacaatatatataatataagatgcaggatataaaacaatattatacataggttatatatattatatatatgacactgtatactattatatacataatgtatacgtatgtttgtgggtgccctttttcccatctcataacttgttttaagaagcgcagcctaataacgtgtgggcttgggattcagttcttgaaacaaaactctgagccttcaatgacctttcggtctatgtaaaagcactcctgtcttcctggcagcagttggacctcacaatgtggattgtgccctcacccagcaatgtttatgccctatcgccatggtgacggaattaggggtctcctgctcttcgtcctaaggaccactgtctgtgctgtgtctttcaaaggtcagaaaagattgaacctttgtggttttattttccctaagtttgatttttctcatggggaacctgtgttgctgctttgaaggtatattcaactggcctttcaaatgccaactcttcatattactagttaatgctttcaaaatatgttatttaaaaaattatcctctgtatt

SEQ ID NO: 7990 - DNA, 189 bp, Protomyxzoa rheumatica
atagtttgggtactttgatattttatgtacactataaaatgtatatctggtgtactttgatattttatgtacagaataatatatatatttgatgtaatttcatactttatctacagtatataatacatgcttttggtattttgatatttcttgtacagtatagaatatataccttgggtactttgatat

SEQ ID NO: 7991 - DNA, 144 bp, Protomyxzoa rheumatica
caaagtatgtattatatactgtacataaaatatcaaagtaacaaaactatttattttatactggacataaaatatcaaaatacccaaactatatatacggtactgcacataaaatatcgaagtacccaatgtatgtattatata

SEQ ID NO: 7992 - DNA, 158 bp, Protomyxzoa rheumatica
tttagttgagtacacacatcacaaacaagtttctgagaatgcttctttctagtttttatgggaagatattcccgattccaatgaaatcctcaaagctatccaaatatgcacttgcagactctacaaaaagagggtttcaaatctgatctatgagaaga

SEQ ID NO: 7993 - DNA, 134 bp, Protomyxzoa rheumatica
cacataaaaactacacagaagcattctgagaaacttctttggcatgtgtgcattcaactaacagtgttgaacgtatcttttgattgagcagcttagaatctctctttttgtagaaaatgcaagtagatatttgg

SEQ ID NO: 7994 - DNA, 189 bp, Protomyxzoa rheumatica
agaatctgcaagtggatatttggatagctttgaggatttcgttgcaaacgggatatcttcatataaaacctagacagaagcattctcagaaacttccttgtgatggttgcattcaagtcacggagttgaacattggctttcatagagcaggttggaaacactctttttccattccctggaagtggacat

SEQ ID NO: 7995 - DNA, 124 bp, Protomyxzoa rheumatica
tgaccacagggtgctttgtgacatatccctgcaatgatcacccaggtgatataactgttctctaggatctgaccacagggtgttttgtgacttatccctgcaatgatcacccaggtgatatacc

SEQ ID NO: 7996 - DNA, 133 bp, Protomyxzoa rheumatica
gccaaacttgacagaagctttctcagaatctgctttgtgatgtgtgcatttacctcacagagtggaaccgtccttttgatagagcagttctgaaacagtctttttgtaggatctgcgagtgttcattttggag

SEQ ID NO: 7997 - DNA, 156 bp, Protomyxzoa rheumatica
tcttcacataaaaactacacagaaacattctgagaaacttatttgggatgtgtgcattcctctcacagagttgaaccaatcttttgattgagcagttttgaaacaatctttttgtataatctgcaagtggatacttggaacactttgaggcctatt

SEQ ID NO: 7998 - DNA, 146 bp, Protomyxzoa rheumatica
aaacctgctctatgaaagggaacgttcaactctgtgacttgaacgcaaacatcataaagaagcttctgagaatgctgctgtctgctttgtacatgtaatcccgtttccaacgtaaccctcaaagctatccaaatatcctcctgcag

SEQ ID NO: 7999 - DNA, 159 bp, Protomyxzoa rheumatica
tactttatgatgtgtgcattcagttcacaatgtagaaccctcctgttcatagaattgttttgaaacagtctctttgtaggatgtgcaagtggatatttggagagatttgaggcctatgttggaaaaggaaatatcttcacataaaaacaggacagaagc

SEQ ID NO: 8000 - DNA, 94 bp, Protomyxzoa rheumatica
tgcctctgcactccatcctgggtgacagagtgagatcctgtcgaaagaaagcaatggaatggattggagtggaatgcaatggaatggaatggaa

SEQ ID NO: 8001 - DNA, 510 bp, Protomyxzoa rheumatica
tgaaacactctttctgtagtatccggaagtggacatttcgatcgatttcaggcctatgttgaaaaaggaaataccttaacataaaaactagacagaagcattctcagaaacgtctttgtgatgtgtgtcctcaactaacagagttcaacctttcttatgatacagcagttgggaaacactctttttatagaatttgcaagttgatacatggatagccctaactatttcgttggaaacgggaatatcttcacataaaacctagacagaagcactctcagaaactactttgtgatatctgcattgatatcagagagttgaatattccctttctaagggcaggtttgaaagcgtcttttcgtggaatctgcaggaggatatttggatagctttgaggattacgttggaaacgggattacatatacaaagtagacagcagcattctcagaagcttctttgtgatgtttgcgtttaagtcacagagttgaacgttccctttcatagagcaggttt

SEQ ID NO: 8002 - DNA, 169 bp, Protomyxzoa rheumatica
tttggacttctctgaggatttcattggaaacgggataaacctcacctaactaaacagaagcattgtcaggaacttcttcgtgatgttggcattcaactcacagagttgcaccgtcccttgtgagttcaggttgaaacactcttttcgtagtatctgcaagtggagattt

SEQ ID NO: 8003 - DNA, 178 bp, Protomyxzoa rheumatica
ttctcagaaacttctttgtgttgtgtgcattcaactcacaaagttgaacttttcctatgattgagcagttttgaaacactctttctgaagaatctgcaagtggatatttggagcgctttgaggcctacggtggaaaaggaaacaccttcacaaaaaaactagagcagaagcattctca

SEQ ID NO: 8004 - DNA, 149 bp, Protomyxzoa rheumatica
aatggaatcaacccgagtggaatggcatggaatggaatggaatgccatggaatggaatggaatcattcccagttgaatagaagggaatgcattcgagttgaatggaaaggaatggaatcaccccgagtggaatggaagggaatggaatg

SEQ ID NO: 8005 - DNA, 149 bp, Protomyxzoa rheumatica
agaaactgctttgtgatgtgtgcattcaactcacagagtttaacctttgttttcatagagccgtttggaaacacacagtttgtcaaatctgtaagtcgatattcggacctatttgaggccttcgttggaaacgggatttcttcatataa

SEQ ID NO: 8006 - DNA, 446 bp, Protomyxzoa rheumatica
atatccacttgcaggttctacaaaatgagtgtttcaaaaccgctcaatcattagataggttcaactctgtgagacgaatgcacacgtcacaaagaagttttacggaatgcttctatatagtttttatttgaaggtatttccttttccaccctaggttgcaaagggctccaaatatccacttgcagattcgacaaaaagagagattcaaaactgctcaatgataagtccaactctgtgggttgaatccatgcctcacagagaagtttctcagaatgcttctctgtagtttctatgtgaagatatttcctttttcacaataggcctcaagctttccaaatatccacttgcagattccgcaaaaagagagatacaaaagtgctctatcaaaagataggttcgactctgggagttcaatgcaaacatcacaaagaagtttctcagaatgc

SEQ ID NO: 8007 - DNA, 103 bp, Protomyxzoa rheumatica
aagcgttctccgaaactcctttgtgatatgtgtgttcaatgcacagaggtgaacctttctttagattgagcagttttgaaacactgcttttctagaatctgct

SEQ ID NO: 8008 - DNA, 176 bp, Protomyxzoa rheumatica
gtccattccatttcatgcaattccattcgtgtccattccattccattccattccacttgagtccattccattccagtccattctattccatgccattccattctattccatttgcgtcctttacaatccattccattcgagtccattacataccattccatccaattcgagtccat

SEQ ID NO: 8009 - DNA, 156 bp, Protomyxzoa rheumatica
taatagaatggaaagcaatggaatggaacgcactggattctagtgcaattgaacctattggaatggaatcgaatggaatggtttggcatggaatggactcaaatggaatggacagtaacaaaatggaatggaatagggattcgaacggaatgcaat

SEQ ID NO: 8010 - DNA, 125 bp, Protomyxzoa rheumatica
tgatttgaggcctatggtggaaaaggaaatatcttcacatcaaaggtagacagaagaattccgagatacttctttgtgatgtgtgagttcatctcacaggattgaaactttcttttcattgaact

SEQ ID NO: 8011 - DNA, 210 bp, Protomyxzoa rheumatica
taaaatatcaaattacccaaactgtatattattatatactgtacataaaatatcaaagtacctgaaatatatattgtatactgtacataaagtatcaaagtacccaaaacatatactctatactgtacataaaatatgaaggtacatcaaatatatcttatatcctgtacataaaatatcaaagtacacctattatatattgtgtactgt

SEQ ID NO: 8012 - DNA, 254 bp, Protomyxzoa rheumatica
agaatgcttctgtctggattttatctgaagacaatcccgtttccaaagaaatcctcaaagatatgcaaatatgctcctgcagattctacaaaaagagtgtttcaaaactgctctatgaatagaaaggttcgactctgttagtagagggcacacatcacaaacaagttgccgagaatgcttctgtctggtttttatgggaagatatttccttttccaacacaagcctgaatgcgctccaaatggacacttccaga

SEQ ID NO: 8013 - DNA, 161 bp, Protomyxzoa rheumatica
tttatgtacagtatacaatatatagtttgagtcctttgatattttatgtccagtataaaatagatagttttcgtaattgatattttatgtacagaatatagtttgagtactttgatattttgtgtacactttattataaatgtttgggtactttcatattt

SEQ ID NO: 8014 - DNA, 133 bp, Protomyxzoa rheumatica
cagattcaactcagttacttgaatgcacacatctcagtgaagttcctgagcatgcctctgtctagtttttttgtgaagatatttccttttccgccaaaggcttaaaagcgctccaaaatgaacactcgcagat

SEQ ID NO: 8015 - DNA, 236 bp, Protomyxzoa rheumatica
tggaatcaaatggaatggaatcaaattgaaaggagtcgaatggcacggaatggaatcgaatggattgcagtgaagtggagtggagtggaatggactgggatggaatggaattgaatgtagaggacgggagtggagttgaatggactcaaatggaatggaaggggaaggaatggaattgaacggaatggagtataatggagtggagtggaatgtaatgcaatggaatggaatggaat

SEQ ID NO: 8016 - DNA, 135 bp, Protomyxzoa rheumatica
aataataataaaataataaataaataaataaataaaaaggaaatatattcacataaaaacttgacagaagcattctgaggaacttctttgtcatgtgtgcattcatttcacagagttgaaactttcttttgattg

SEQ ID NO: 8017 - DNA, 128 bp, Protomyxzoa rheumatica
tgtgagttgaatgcaaacctcacaaagatgtttctcagaaagcttctgtatagtttttatatgaagatacttgcttttccacaatatacctcaaatctccccaattatccacttgcagattctacaaa

SEQ ID NO: 8018 - DNA, 125 bp, Protomyxzoa rheumatica
aaacatttataataaactgtacataaaatatcaaagtactaaaactatatatcatatactgtacataaaatatcaaagtacccatactgtgtattattatatactgtccataaaatatcaaagta

SEQ ID NO: 8019 - DNA, 155 bp, Protomyxzoa rheumatica
aaaatctagacggaggcattctcagaaactgctttgtgatgtttccattcaagtcacagagttgaatattctctttaatagagcacgtttgaaacactctttctgcactatctggaagtggaaatttcgagcgctttgaggcctatggtgaaaaa

SEQ ID NO: 8020 - DNA, 152 bp, Protomyxzoa rheumatica
tggattttatgtgaagatataccgatttcgaacgaaggccacaaagtgctcccaatatccacttgcagatcctacaaaaagagtgtttccaacgtgaactatcaagggaaggttcaactctggactttgaatgcaaacgtcccaaagaagtt

SEQ ID NO: 8021 - DNA, 193 bp, Protomyxzoa rheumatica
cccgtttccaacgaaggcctcaaagagttccaaatatccacttgcagactgtacaaactaagtctttccaaactgctctatgaaaaagaaatgttcaactctgtgagtttaatgcacacatcacaaagcagtttctgagaatgattccctctagtttttatacgaagatagccttttctaccattggcctcaa

SEQ ID NO: 8022 - DNA, 153 bp, Protomyxzoa rheumatica
atatttggatagctttgaggatttcgttggaaacgggaatgtcttcatgtaaactctagacagaagcattctcagaaactgctttgggatgtttcaattgaagtcacagtgttgaacattccctttcacagagcaggtttgaaacactctttt

SEQ ID NO: 8023 - DNA, 157 bp, Protomyxzoa rheumatica
agggaatgttcaactctgtgacttgaatgcacatatcacagagcagtttctgagagtgcctgtgtctagattttatactaaagtattcccgtttccaacgaaatcgttagagctatccaaatatccagttacagtttctaccaaaagggtgtttcca

SEQ ID NO: 8024 - DNA, 93 bp, Protomyxzoa rheumatica
ggcctgaaagcgctcgaaatgtccacttccagatactgcagaaagagggtttgaaacctgctctatgaaagggaacgttcaactctgtgactt

SEQ ID NO: 8025 - DNA, 240 bp, Protomyxzoa rheumatica
gaattgaatcaacccctgtggaatggaatggaatggaggggaatcgaatggaatggaatcgaatttaatggaatggagtggaatagaaaggaattgaatcaacccaagtggaatggaattgaaaggaatggaatggagtagaatagaacggaattgaatcaacccgagtggaattgaagggaatgaaattgaatggaatgcaatggaatagaatggaattgaatcaacccacgtggtatg

SEQ ID NO: 8026 - DNA, 163 bp, Protomyxzoa rheumatica
ggagatccctaatcccgtcaccatggcgatagggcataaacattgcagggtgacggcacaatccacattgtgaggtccaactgctgccacgaagacaggagcgcttctacatagaccgaaaggtcattgaaggctcagtgttttgtttcaaaaacagaatccc

SEQ ID NO: 8027 - DNA, 145 bp, Protomyxzoa rheumatica
acgaagatatttccttttgtaccactggcctcaaatcgctagaattctccacttgcaaattccacaaaaagagtgtttccaatctgctctgtctcaaggaaggttcaactctgtgagttgaatacacacacacaaagaagctact

SEQ ID NO: 8028 - DNA, 302 bp, Protomyxzoa rheumatica
tctgtctagcagaatatgaagaaatcccgtttccaacgaaagcctcaaggatgtctgaatatccacttgcagactttacaaacagagtgtttcctaactgctctatgagaagaaaagttaaactctgtgagttgaacgcacacatcacaaaagattttctgagaatcattctgtctagtctttatatgaagatagtttccttttctaccattgacctcaaagcggctgaaatctccaccctgccaattccacaaaaagagtgtttcaagtctactctgtgtaaaggatcgttgaactctgtg

SEQ ID NO: 8029 - DNA, 95 bp, Protomyxzoa rheumatica
cctgtgaattgaacacacacatcacaaagcagtttctgagcatgcttctgtctagtttgtatgtgaagatagttccttttccctcataggcctca

SEQ ID NO: 8030 - DNA, 152 bp, Protomyxzoa rheumatica
acactcgtttcgtagaatcttcaagtggatatttggactgctttgaggccttcgtcggaaacgggaatatcttcacataagaactagacagaagaattctgggaaatttctttgtgatgtgtgcattcaactcacagagttgaacctttctg

SEQ ID NO: 8031 - DNA, 135 bp, Protomyxzoa rheumatica
ctgagaaacttctttgtgatgtgtgcattcaactcacagaatggaacccttcttttgatagagcagttttgaaagactccttttgtagaacctgcaattggatatttggagcgctatgtggccttaaatgaaaaa

SEQ ID NO: 8032 - DNA, 81 bp, Protomyxzoa rheumatica
acgtttctgagaaagattctgtctcgtttttatgtgaagatatttcctgtttccccagaggcatcaatgggctcacaaata

SEQ ID NO: 8033 - DNA, 126 bp, Protomyxzoa rheumatica
aagtcacaatgcccccgtaggcagagcgtagacaagagttacataacccgggtgttccgtgcagagtgatgtcaaaacgccctctgtaggcagagagtacaaaagtgttccatcacctgggtgatc

SEQ ID NO: 8034 - DNA, 336 bp, Protomyxzoa rheumatica
gcagagcttagacaagagtcacatgtcctgggtgatcagtgcagagataagtaacaatacctccataggaagagcctagacaagagttacctaacccaggtgatccgaacagagtgatgtcacaacgccctctgtaggcacagactagaaaaccgttacatcacctgggtgatcatcgcagagatatgtcacaatgccccctgtaggcagagcatagagaagagttgcaccacctgggtaatcagtgcagagatatgtcacaatttgccctgtagtcagagcatagagaaacgttgcatcacctgggtgatcagtgcagagatatgtcacaatgtc

SEQ ID NO: 8035 - DNA, 193 bp, Protomyxzoa rheumatica
ttctcagaatgcttctgtctagtttatatgtgaagatatttccttttccaccatagacctcaaaccgctccaagtgtccacttgcacattctacaaaaagagagtttcaaaactgccctattaaaaaataggtttaactctgtgagatgaatgcacatagcacaaagtattttctcagattgcttctgtctag

SEQ ID NO: 8036 - DNA, 379 bp, Protomyxzoa rheumatica
cctctttgaggccttcgttggaaacgggatttcttcatataatgtttgataggacaagtctcagtaacttctttgtgctgtgtgtattcaactcatagggttgaactttcctttagaagagcagatgttaaacaccctttttgtggaatttgcaactggagatttcaagcgctttgaggcctacagtagaaaaggaaacatattcttataaaatctagacagaatcattcacagaaacttctttttgatgtgtgtgttcatctcacagagtttaacctttcttttgacggagcagtttgcaaacactgtgtttgcattgtcggcaactggatatttggacctctttgaggccttcgttggaaacgggatttcttcatgt

SEQ ID NO: 8037 - DNA, 268 bp, Protomyxzoa rheumatica
gcattgtggcagctggtgtagtcccagtgtggtgtagtccaagctacctgggaggctgagggagggcaatcgcttgaacccgtgaggcagatgttgcagtgagcaaatttggtgccattgtactccaccctgtgcaacaggacaacactctgtctaaaaaaaaattatatatgatatatgttatatgttatgtaatatgctttatatgtaatatataacctcatatatattatatgtcataatatataatatttatcctgtgtcatag

SEQ ID NO: 8038 - DNA, 144 bp, Protomyxzoa rheumatica
gtatctggaagtgaactttaggagagctttcaggtctatagtgagaaaggttatatcttcaaataaaaactagacagaagcatactgataaacttgtttgtgaagtgtgaactcagataacagaggtggatctttcttttgata

SEQ ID NO: 8039 - DNA, 124 bp, Protomyxzoa rheumatica
aatatccacttgcagactttacaaacaaagtggctccaaactcctccatcaaaagaaaggttatactctgtgaattgaacgcatacatcacaaagtagtttctgagaatgattctgtctagttt

SEQ ID NO: 8040 - DNA, 276 bp, Protomyxzoa rheumatica
gcctaggcaagagttgcatcacctgggtgatcagtgcagatatatgtccaatgtaccctgtaggcaaagcctaggcaagagttacatcacctcggtcatcagttcagggatatgtggaaacgccccagtaggcagagcttggacaagggttacaccacctagtttatcagtgcagagatatttcaaaataacctctgtaggcagatcctagtcaagagttgaatcacctgggtgatctgtgcacagatatttcacaatgccccgttggacagaggg

SEQ ID NO: 8041 - DNA, 81 bp, Protomyxzoa rheumatica
atgcctgaaagctctccaaacatccccttgcagattctgccaaaagagaaattcaaaactgctaaatcaaaagatatgttc

SEQ ID NO: 8042 - DNA, 169 bp, Protomyxzoa rheumatica
aagtgatcacacaggtgatgtaatacttgtctatatctgcacgctggcggcattgtggcatatttctgcactgatcagccaggtgatggactcttgtcttggatcagcctatgggggcacagtgacatctgtctgcactgatcactcatctgatgtaacgcttgtctaa

SEQ ID NO: 8043 - DNA, 153 bp, Protomyxzoa rheumatica
aacagtctttttgtaggatctgcgagtgttcattttggagagcttttaagcctttggcggaaaaggaaatatcttcacagaaaactagacagaggcatgctcaggaacttcattgagatgtgtgcattcaagtaactgagttgaatctgcctt

SEQ ID NO: 8044 - DNA, 155 bp, Protomyxzoa rheumatica
agtttctgagaatgtttctgtctagttttcatttgaagatatttctttttccaccataggcaacaaagcgcactaaatgaacacttgcagattctacaaaaagcgtgttccaacactgatctctcaaaagaaagtttgaagtctgtgagtttaag

SEQ ID NO: 8045 - DNA, 207 bp, Protomyxzoa rheumatica
acatataaaaagcagacagcagcattctcagaaagttctttgtgatgattacattcaagtcacagaattgaacattccctttcacagagcaggtttgaaatactcttttttagtgtgtgtaattggacatttggagcactttccggcctaaggtggaaaaggaaatatcttcctataaaaactagacagaagcattctcagaaactt

SEQ ID NO: 8046 - DNA, 131 bp, Protomyxzoa rheumatica
cttcgaggacaatggtagaaaaggatatatcttcgtattaaaacgagagaaaatcattctcagaaaacactttgtaatgtgtgctttcaactcacagagtttaacctttcttttaactgagcagtttggaa

SEQ ID NO: 8047 - DNA, 218 bp, Protomyxzoa rheumatica
tcacagagtttaacctttcttttaactgagcagtttggaaacactctctttgtaatgtctgcaagtggttaattggccctctttgagccctcctttggaaacgagatttcctcatataatgctagacagaagaattctcagtaacttctgtgtgttgtttgtattcaactcacggatttgaaccttcctttagagagagcagatttgaaacactcttt

SEQ ID NO: 8048 - DNA, 149 bp, Protomyxzoa rheumatica
aaactacaaagaatcattcgcagaaaccacgttgtgatctgtgcattcaactcacagagttcaacctttctttctatagagcagttatgaaacactctctttgtagaacttgcaagggtgtatttagagggcattgaagcctacggtag

SEQ ID NO: 8049 - DNA, 128 bp, Protomyxzoa rheumatica
ggattgcaatggaattgaatggaatggacccaaatataatagactcaaatagaatggacttgaaacgaatggtctcgtatggaatttatttgaattgaatggaatcgaatgaaatacaatagtatgga

SEQ ID NO: 8050 - DNA, 81 bp, Protomyxzoa rheumatica
tttgaatagaatggaatcgaatgaaatacaatagtatggagtggcatcgaatggaatggaatcgaacggaatggaccggaa

SEQ ID NO: 8051 - DNA, 141 bp, Protomyxzoa rheumatica
catcacctagtgatcagtgcagggataagtcgtaaagccttctgtaggcagagtgtagacaagtgtttcctctcaggggtgatcagtgcagagatatgtctcaaagcccctgtaagcagaaccttgacaagggttacatca

SEQ ID NO: 8052 - DNA, 132 bp, Protomyxzoa rheumatica
tgtgtgttcagctcacagagtttaacctttcttttgatggagaagtttggaaacacactgtttgtaatgtctgcaagtggatatttggaacccttgaggacttcgttggaaacgggatttcttcatgtaatg

SEQ ID NO: 8053 - DNA, 146 bp, Protomyxzoa rheumatica
ataaagaagtttctgagaatgtttctgtctagtggttatgggaagatattagctttttccccgtagacctcagagcgctccaaatgtccacttgcacatgctacagaaagagtgcttcaaagctgctctctgaaacggaatgttca

SEQ ID NO: 8054 - DNA, 152 bp, Protomyxzoa rheumatica
tgtaactcttctcaaggctctgactatagggggccttgtgacatatatctgcactgatcatctaggtgatgtaactcttgcttattctctgcctgcagaggtattgtgaaatatctctgcactgatcacccaggtgacgggactcttctcta

SEQ ID NO: 8055 - DNA, 127 bp, Protomyxzoa rheumatica
taatagaatggaaagcaatggaatggaacgcactggattcgagtgcaatggaatcaattggaatggaatcgaatggaatggattggcatggaatggactcaaatggaatggactggaacaaaatgca

SEQ ID NO: 8056 - DNA, 143 bp, Protomyxzoa rheumatica
cgttgtaaacgggaatatcttcatataaaatctagacagcagcactctcagaaaatactttgtgatatctgcattcatatcacagagttgaatattccctttctaagagcgggtttgaaaccgtctttctgtggaatctgcgg

SEQ ID NO: 8057 - DNA, 434 bp, Protomyxzoa rheumatica
aaaggaaatatcttcccataaaaactagacggaagcattctcagaaacttgtttgtgatgcgtgttttcaactaacagagatgaacctttctttttacagagcagtttggaaacactctttttgtggaatctgaaagtggatatttggatagctttgcggatttctttggaaacgggattacatataaaatctagagagaagcattctcaagaacttctttgtgatgtttgcattcaagtcacaggactgaacgttccctttcatagagcaggtttgaaacactctttctgtagtatctgcaagctgacgtttcatgcgttttcaggcctatggtgagaaaggaaatatcttcaagtaaaaagtagacagaagcattctcagaaacttatttgcgatgtgtgtcctcaactaacagagttgaacctttcttttg

SEQ ID NO: 8058 - DNA, 139 bp, Protomyxzoa rheumatica
ttttatgtacagtatataatatatatttgggcgaccttaatatattatgtacagtatataatatatatttgggtgactttaatatattatgtacagtatataatatattttggtgtactttgatattttatgtacagaa

SEQ ID NO: 8059 - DNA, 180 bp, Protomyxzoa rheumatica
gggtgatcagtgcagtgatatgtcacaatgccgtgtagccggagcccagactaaagttacagcacctgggagatcagttcagagatatgtcacaatgtccacactaggcagagaccaggcaagagttgtatcacctcgggatcagtgcagagatatgtctcaatccccctgtgggcacag

SEQ ID NO: 8060 - DNA, 122 bp, Protomyxzoa rheumatica
agagctccaaatatccacaagcagattctagaaaagcagtttttcaaaactgctcaatgaaaagaaaggttcaactctgtgaattgaacacacatatcacaaaggagtttcggagaacgctt

SEQ ID NO: 8061 - DNA, 117 bp, Protomyxzoa rheumatica
ggaatctgcacatggataggtggaactctgtgaagatttctttgcaaacgggaatatcttcacataaagagtaaacagatgccttctcagaaacttctttgtgaggcatgtgttcaa

SEQ ID NO: 8062 - DNA, 169 bp, Protomyxzoa rheumatica
gaatgcttccgtgtagtttttatgtgaagatatttacttttccacagttgtcccaaagctctaaaatgtccacttgcagaccctccaaaagagtgtttcagaattgctcaatcaaagggaaggttcaattctgtgtgaccaatgcactcatcacaaagaagtttgtctg

SEQ ID NO: 8063 - DNA, 261 bp, Protomyxzoa rheumatica
actttgatattttatgtacagtacataatatatagtttggatactttgatattttatgtacagtatacaatatatattttgcgtattttgatattttatgtagagtatataatgtatactttgggtactttgatattttatctacagtttacactatatattttgggtaccttgatattttatgtacagtatatgctacacagtttgggtacttggatgctttatgtacagtatataatacacagtttgagtactttgata

SEQ ID NO: 8064 - DNA, 209 bp, Protomyxzoa rheumatica
cttctcctaaaaaccagacagaagcattctcataaacttccttgtgatgtgtgtactcaagtaacacagttgaaccttccttttgacagagccgttttgaaacagtctttttgtagaatctggaagtagatatttggatacctttgaggatttctttggaaacgggatatcttcatataaaatctagacagaagcattctcagaaactt

SEQ ID NO: 8065 - DNA, 162 bp, Protomyxzoa rheumatica
agacctagatccttataccagggccagatcttaccccgtaagacaccaacagatccagatccttatacccacacccagatcctacctcctcagatactgacagacccagatcctcacaatcctaatgggccagatcctaccttctcagacatggacagaccc

SEQ ID NO: 8066 - DNA, 191 bp, Protomyxzoa rheumatica
cactgtttttgtagaatctgcaggaggatatttggagcactttgagacctattgtggagaaggaaataatttcacataaaaactactctgaaatattctgagaaactaatttgtgatgagtgcattcatcacacagatttgaacttttcttttgattgagcagttttgaaacactctttttgtagaatctg

SEQ ID NO: 8067 - DNA, 168 bp, Protomyxzoa rheumatica
gtgcattctactcacagagttgaaccttccttttgagagaacagttttgaaacaatctttttgtactatctgcaagtggatatttggaacaatgggaggactaagatggaaaaggaaatatcttcacagccaaacttgacagaagctttctcagaatctgctttgtga

SEQ ID NO: 8068 - DNA, 123 bp, Protomyxzoa rheumatica
ttagttgaggacacacatcacgagtaagtttctgagaatgtttatgtctaggttttatgggaagatatttcctttttcaccataggcctcgaagcgctccaaatgtccacttccagggaatgg

SEQ ID NO: 8069 - DNA, 125 bp, Protomyxzoa rheumatica
tggaagcgctcgaaatgtccacttccagatactacaggaagagtgtttcaaacctgctctatgaaagagaatgttcaactctgtgacttacaagcaaacatcacaaagaagcttctgagaatgct

SEQ ID NO: 8070 - DNA, 201 bp, Protomyxzoa rheumatica
tgcttctgtgtatttttatgtgaagatatttcaatttccaccataggcctcaaggctctccaattatccacttgcagatcctacaaaaagattttcagaactgctctatcaaaagaaaagttcaactctgagagatgaatgcacacaaaacaaagaggtttttgagaatgcttctgtgtagtttttctgtgaagttatttc

SEQ ID NO: 8071 - DNA, 237 bp, Protomyxzoa rheumatica
actatatattgtataatgtacataaaatatcaaagtaccaatagtatgtattatgtactgtacataaaatatcaaagtacccgaagtatgttttacatactgtacataaaatatcaaagttcccaaagtatgtattatataccgtacataaaatatcaaagtactcaaaatatatactgtacataaaacatcaaactaccaacactatatattttatactgcacataaaatatcaaa

SEQ ID NO: 8072 - DNA, 186 bp, Protomyxzoa rheumatica
gaacggaatggaatcaacacgagtggaatggaatggaaagtaatggattcaacccgagtggaatgaaatagaatgtaatgcagtgggatggagtggagtcaacccgagtggaatggaatggaatggactggaatggaatgaaatgaaatggatcggaatggaatccaatggaatcaactggaatgg

SEQ ID NO: 8073 - DNA, 154 bp, Protomyxzoa rheumatica
tcaaaactgctaaatcaaaacaaaggttcaactctgtgatgaatgctctcatcagaaagaagtttctctgaatgcttctgtgtagcttctatttgaagatatttccttttccactatagggcgaaatagggctccaaatattcacttgcagatt

SEQ ID NO: 8074 - DNA, 128 bp, Protomyxzoa rheumatica
tattttatgtacagtatataatatatggtttgtgaacttttatatttcatgtacagtataaaatatatatttgtggtactttggtattttacgtacagtatataatctatatttgatgtactttcata

SEQ ID NO: 8075 - DNA, 161 bp, Protomyxzoa rheumatica
aaactagacagaaggtttctgagaaacttctttgtgagatgttcgttcatctcacatagttgaaccttacttttgatggagcagtttggaaacactatttttgtagtatttgcaagtggacattgggagcactttgcagcctgttttagaaaagggaatat

SEQ ID NO: 8076 - DNA, 177 bp, Protomyxzoa rheumatica
atgttagacagaagaagtctcagtaacttctttgtgctgtgtgtattcaactcacagagctgaactttactttagacagagcagatgttaaacacactttttgtggaatttgcagctggagatttctagcgctttgaggcctatggtagaaaaggaaacatcttcttataaaatcta

SEQ ID NO: 8077 - DNA, 149 bp, Protomyxzoa rheumatica
gtacaccaaatatatattatatgctgtacatactatattaaagttgcccatatatacattatacactgtacataaaacatgaacgtacatcaaatatatggtatatgctgcacatataatatcaaagtacccaaagtatgtattataca

SEQ ID NO: 8078 - DNA, 177 bp, Protomyxzoa rheumatica
caaaactgctctctcaaaaggaaggttcaactctgtgagttgagtgcacacatcacaatggagtttctgagaatacttctgtctactttgtatgtgaaggtatttccttttccacctgaggccccaagtcactacaaatatccacttgcagatactacaaaaagactgtttcaaaac

SEQ ID NO: 8079 - DNA, 174 bp, Protomyxzoa rheumatica
atatgaagatattcccgtttccaaagaaaccttcaaagctatccaaatatccacctgcagatcctacaaaaagagtgtttccaaaatgctgtatcaaaacaaaggttcaactctgttagctgagaacacacatcgcaaataagtttctgagaatgcttctgtctagtttttatt

SEQ ID NO: 8080 - DNA, 130 bp, Protomyxzoa rheumatica
tgtatgtgaagatagttccttttccctcataggcctcaaatcgttccaaatatcgacttgcagatactacaaaaagactgtttgaaaaccgttctctcagaaggaaggttcaactccgtgtgttgaatgc

SEQ ID NO: 8081 - DNA, 173 bp, Protomyxzoa rheumatica
aatcacgtttcaaacgaaggccacaaagaggtccaaatatccagctgcagattctgcaaaaagagggtttgaaaactgctccatcaagaggaatgttcaactctgtgcgttgaatgcaaatatcacaagtaagtttccgacaatacttctgtgtagtttttatgtgaagatat

SEQ ID NO: 8082 - DNA, 122 bp, Protomyxzoa rheumatica
tgtgagtcgtaagcacacatcccaaagtagtttctcagaatcattctatctagtttttctaagaagatatttccttttctaacataggcctcaaacggtgctaaatatccacttggaaattc

SEQ ID NO: 8083 - DNA, 124 bp, Protomyxzoa rheumatica
tctttgaggcttatggttaaaaagggaatatcttcacataaaaactacagagaaactttctcagaaacttctttgggatgtgttcattcatctcacagagttgaagctttcttttgattgagca

SEQ ID NO: 8084 - DNA, 297 bp, Protomyxzoa rheumatica
gcattctgagaaacttctttgtgatgtttgcattgaactcacagagtcgaacctatcttttgatagagcagttttgtatctctctttttgaagaatctgcaagtggatatgtggaaagcttgaggcctattgtgaaaaaggaaatctcttcacataaaaactacagagaagcattctgagaaacttctttgggaggcatggattcaacccacagaattggacttatcattgagcagttttgaatctctctttctgtcgaatctgcaagtggatatttggagccccttgcaacctatg

SEQ ID NO: 8085 - DNA, 149 bp, Protomyxzoa rheumatica
attttatgtacagtatataatatacactttgggtactttgatattttatgtacagcatataatgcacactttcggtactttgatattttatgtgcagcatataatatgtatttgaagtaccttcatattttatatacagtatacaatat

SEQ ID NO: 8086 - DNA, 149 bp, Protomyxzoa rheumatica
gcaggtttgaaacactctttctggagtatctggatgtggacatttggagcgcttggatgcctttggtgaaaaagggaacgtcttcccataaaaactagacagaagtattctcagaaacttgtttgtgatgtgtgtacccagccaaagga

SEQ ID NO: 8087 - DNA, 201 bp, Protomyxzoa rheumatica
tggccagtggtatcaaggatgtgggctgatccaatatgtatattgccagaaaaggctctcactttgagcctttctcaggcaacagattaggaatatagcacacaatgagaacacagtgatctctcaagcatctcccatgaaattagctagatacagggctgtctctagaatgtgggtgtctggttcccaaagttctaaatt

SEQ ID NO: 8088 - DNA, 297 bp, Protomyxzoa rheumatica
tccaaatatccacttgcagattctgcaaaaagagtgtttcgaaacaactgtatgaaaagaaaggttaaacactgtgagttgaacgcacccattgcaaagcattttctgacaatgattccgtctaattattatacgaaggtatttccttttctatcatgggcctcaaagcgcttgatacctccacgtgaacattccacaaaaagagtgtttccaatctactctgtctaagggaacgttcaactctgtgagttgagtacacacacacagaaagaattcactgagagttcttctgtctgg

SEQ ID NO: 8089 - DNA, 82 bp, Protomyxzoa rheumatica
acacacacagaaagaattcactgagagttcttctgtctgggattacatgaagaaatcccgtttccaacgaaggcctcaaaga

SEQ ID NO: 8090 - DNA, 140 bp, Protomyxzoa rheumatica
atatatttggtgtactttgatattttatgtacagaatataatatatctttgatgtaccatcatatttcatgtacagtatacaatatatattatgggtactttgatattttatgtacagtatgctatatattcgggtactt

SEQ ID NO: 8091 - DNA, 203 bp, Protomyxzoa rheumatica
acaagaccattgtaggcagagcctagacaagagttatatcacctatgtgatcagtgcactgatatgtcacaatgtcgtgtagccagagcctagactaaagttgcagcacaagggagatcagtgcagagatatgtcacaatgtccccagtaggcagagaccaggcaagagttggatcacctcgggatcagtgcagagatatgtc

SEQ ID NO: 8092 - DNA, 123 bp, Protomyxzoa rheumatica
gtttgtaaagtctgcaagtggatattcagacatctttgagactttcgttggaaacgggatttcatcatattctgctagacagaagaattcccagaaacttcgttgtgttgtgtgttttcaact

SEQ ID NO: 8093 - DNA, 167 bp, Protomyxzoa rheumatica
ccattcctttccgctcgggttgattcaattccattccattccaatccattgcattccattcgggttcattcctttccattcctttccattccgttcagttccattcctttccattccattactctcgtgttgattccacaccattcccttccattcattcctttcca

SEQ ID NO: 8094 - DNA, 115 bp, Protomyxzoa rheumatica
ttccattgcattccgttccattacattcccctgcactcgcgttgatgcaattccattccattccgttccattccattcaattccattccattacaattcgttccattccattcta

SEQ ID NO: 8095 - DNA, 151 bp, Protomyxzoa rheumatica
cccttcaaatgtccacttgcagattctacaaaaggagagttttcaaactgctcaatcaaaagaaattttcaactctgtgagataaacacagacatcacaatgaagtttctcagaattcttctatctagtttttatgtgaggatatttcctt

SEQ ID NO: 8096 - DNA, 144 bp, Protomyxzoa rheumatica
tgcacacatcacaaagaagtttctcagaatgcttctttgtagttttcatgtgaagatatttccttttccaaagaaggccacaaactactcccaatatccacttccaggttctacaaaatgagtgtttcaaaactgctcaatcat

SEQ ID NO: 8097 - DNA, 155 bp, Protomyxzoa rheumatica
ccagtttttaataatcagctttaatataaggtatacccaaataatggttaattaaatgacaatgaaagtatgttatagcagatgttcacttatcaacatgccttgaaattaaaggtttataagatgcataagggcaaagtttttgatgttgccat

SEQ ID NO: 8098 - DNA, 259 bp, Protomyxzoa rheumatica
tgtgtgcattcaactcacagagttgaaactttcttttgatagagcagattggaatccctctttttgtagaatttgcaagtggatatctagacagctttgaggccttccctggaaacgagtgtatcttcacataaacactagacagaagcatcctcagaaacttgttggtgatgcttgcattcaactcacagaattgaacatttcttttcctagagcagttttgaaacactctttttgtagtatctggaagtggacattt

SEQ ID NO: 8099 - DNA, 123 bp, Protomyxzoa rheumatica
acttcattgttatgtgtgcatttaactcacagttttgaatctatcttttgattgagcacttttgaatctctctttttgtagaatctgaaagtggatacttggagaccttggcggcctatggtg

SEQ ID NO: 8100 - DNA, 225 bp, Protomyxzoa rheumatica
ttgtgctgtatgtcctcaattaacagagttgaaccattgcctggatacagcattttggaaacattccttgagtagaatctgcaagttgatacttagatagatttgaagatttcgttggaaaagggaatatctccatataaaatcaagagggaagcattctcagaaactgctttatgatgtttcccttcaagtcacagagttgaatattcccttttatagagcacg

SEQ ID NO: 8101 - DNA, 165 bp, Protomyxzoa rheumatica
atcacctttgtcatcagttcagggatatgtgagaacgcccctgtaggcagagtctagacaagagttacaccacctaattcatcagtgcagagatatttcacaataccccctgtacgcagatcctagacaagagttgaatcacctgggtgattttgtgcacagata

SEQ ID NO: 8102 - DNA, 284 bp, Protomyxzoa rheumatica
cgaataactcaaagagttccaaatatacacagtcagatactgcaaaaggagtgtttcattcctgctctgtcaaaagacagtttcaactatgttagttgaatgcacacatctcagtgaagttcctgaggaggcttctgcctagttttttgtgaagatattcccttttcaaccatgggcttcacagcgctccaaatgaaaacttgcaggtcctacaaaaagactgattcaaaactgctctcccaaaaggaaggttcaactgtgtgagttgaatgcacacatcacaa

SEQ ID NO: 8103 - DNA, 137 bp, Protomyxzoa rheumatica
agcagtttggaaacagtccttttgtaggatctgcaaagggatatttctgagtccattgaggcctatgttgaaaaaggaaatatcctcacttaaaaactagacagaagctctctgagaaacttcttagtgatgtgtgc

SEQ ID NO: 8104 - DNA, 128 bp, Protomyxzoa rheumatica
tctgcaagtgtacatttggagcactttcaggcctgtgtggaaaaggaaatatcttcacctagaaactagacagaagcattctcagaaccttctttgtgatgtgtgcactcaactaacagagttgaacc

SEQ ID NO: 8105 - DNA, 188 bp, Protomyxzoa rheumatica
acagtatataatatatagtttgagtactttgatattttatgtacagtatataacacatacttttggtactttgatattttatgtagagtatacaatacatactttgggtacatccatattttatgtacagtatactatatatagtttcggtactttgatattttatgtccagtataaaataaatagtt

SEQ ID NO: 8106 - DNA, 102 bp, Protomyxzoa rheumatica
ttaacctttcttttgatagaccagttatgaaacactctttttgtggaatctgcaagtaaatttttggacttttttgaggccttcattggaaacggggtttct

SEQ ID NO: 8107 - DNA, 248 bp, Protomyxzoa rheumatica
caacgaaggcctcaaagaggtccaaatatccacttgcagacttgtcagagtgtttccaaactgcaccatcaaaagaaaggttaaactctgtgagctgaacacacacatcacaaagtagtttctgtgaatgattctgtctcgtttttataggaagatgtctccttttctacctttggtctcaaagccattgaaatctccatatggaaactccacaaaaagagtgtttcaaatctgctctttctgaagga

SEQ ID NO: 8108 - DNA, 157 bp, Protomyxzoa rheumatica
tacccaaacatgtattatatactgtacataaaatatcaaagtacacaaatatttattgttcactctaaataaaatatcaaagtaaccaaactatatattatatattgtacataaaaaatcaaagtacccaaactatatattttatactgtacataaa

SEQ ID NO: 8109 - DNA, 175 bp, Protomyxzoa rheumatica
caaagcatgtattatatactgtccacaaaatatcaaagtacccaaattaggtattatatactatacataaaatattaaagaacccaaagtatgtagtatatactgtacataaaatatcaaagtacgcaaagtatgtataatatactgtacataaaatatcaaagtacccaaagta

SEQ ID NO: 8110 - DNA, 122 bp, Protomyxzoa rheumatica
ccaaaggcgtcaaagtgctccaaatgtccacttccagatatgacagaaagagtgtttcaaacctgctttaggaagggaaattttcaactctgtggcttgaatgcagatatcacaaagcagtt

SEQ ID NO: 8111 - DNA, 168 bp, Protomyxzoa rheumatica
aagtggatatttggatagctctaatgatttcgttggaaactggaatatcatcatctaaaatctagacagaagccctctcagaaactactctgtgatatctgcattcaagtcacagagttgaacattcgttttcttagagcacgtttgaaacactctttttgtagtgtc

SEQ ID NO: 8112 - DNA, 211 bp, Protomyxzoa rheumatica
tccaaatatccacttgcagattctgcaaaaagagtgtttccaaactgctctatgaaaagaaacgttaaactctgtgagttgaacgcaaacatcacaaagtagtttctgagaatgactccgtctagtttttatacgaagatatttcctttcctaccattcacttcaaagcgcttgaagtctccccctgaaaattccacaaaaagtgtttcca

SEQ ID NO: 8113 - DNA, 391 bp, Protomyxzoa rheumatica
ccttttctaccataggccacaaacgtctccaaatatccacatgcagcttctacaaaaagagagattcaaaacttctcaatcaaaagataggttcaactctgtgagttgaaagcacacctcacagagaagtttctcagagtgcttctgtgtgtttttatgtgaagatgattccttttccacaataggcctcaaagctctccaaatatctgcgagcagagtctacaaaatgagagattcaaaactgctcaatgaaaagataggttcaactctgtgagttgaatgcacacctccaaagaagtttctcagaatgcttccgtgtagtttctatgtgaagatatttacttttccacaattgtcccaaagctctaaaatatccacttgcagaccctct

SEQ ID NO: 8114 - DNA, 190 bp, Protomyxzoa rheumatica
aatttctccaaaagcttctgcctagtttttatggaaagatacttcatttttcaacataggccaaaagtgctccaaatattcatttgcagattctacaaaaagactgttcccaaactgctcaatcaagagaaagtttcaacccggtgagttgaagtcacacatgacaaaatagtttctcagaaagtatctg

SEQ ID NO: 8115 - DNA, 323 bp, Protomyxzoa rheumatica
aaagtacccaaactatatattatatactgtacataaaataagaaagtacccaaagtatgtattatataatgtgcataaaatatcaaagtacccaaaatatgtattatatactgtacataaaatacgaaagtaaccaaacatttataataaactgtacataaaatatcaaattactcaaactctatactgtacataaaatatcaaagtaccaaaactacatattttatactgcacataaaatatcaaagtactcaaactatatattgtatactatacataaaatatcaaactacccaaagtatgtattatatactgtacataaa

SEQ ID NO: 8116 - DNA, 153 bp, Protomyxzoa rheumatica
gttacatcacttaggtgatcagtgtagagatatgtgaaaagtcccatgtagacagagcctagacaagtgttccatcagctagtgatcagtgcagggataagttgtaaagcctactgtaggcagagtgtagacaagtgtttcctccctggggtg

SEQ ID NO: 8117 - DNA, 209 bp, Protomyxzoa rheumatica
tgtttagttctgtgcggtttatcccgtttccaacgaaatcctcagagaggcctaaatatccacttgcacattctacaaatagtgtgtttcgaaactgctccatccaaaggaatgttcagctctgtgagttaaactcagtcgtcaccaagagttttctgtgaatgctactgtctagcttttatatgaagctatttcctttactaccatag

SEQ ID NO: 8118 - DNA, 88 bp, Protomyxzoa rheumatica
tgagggacaaacactcagaaaacagcaggagtgttctggaatcctaaatgagggacaaacactcagaaaacagcaggagtgttctgga

SEQ ID NO: 8119 - DNA, 149 bp, Protomyxzoa rheumatica
agatatgttcagctctgtgagttgaatgcacacatcacgaagtagtttctgagaatgcttctgtgaattttttgtttgaagatatttccttttccacctcagggtgcaaagggttccaaatatccacttacaaattctacaaaaagaga

SEQ ID NO: 8120 - DNA, 155 bp, Protomyxzoa rheumatica
gtcttgaatggaatgcaattgaaatgaatggactcgaaagatattgaagtgtttggaatggaatggaattgactcgaacggaatggacacaaatggaatggaatggaatggactcagactcgaatggaatggaatggaatggaatggaatggaat

SEQ ID NO: 8121 - DNA, 136 bp, Protomyxzoa rheumatica
gaatgcttctgtgtagtttctatttgaagatatttccttttccaatatagggcaaaatagggccccaaatattcacttgcagattctacaaaaagggagattctaaactgctcaatcaacagataccttcaacaat

SEQ ID NO: 8122 - DNA, 148 bp, Protomyxzoa rheumatica
tcacccaagtaagtgatgtaaatattgtctaggctttgcatacagggggctgtgtgacatagctttgcactgatcacccaagtgatgtaactcatctacgttctgcctacaggagatttgtgacatatctctgcactgatcacccagg

SEQ ID NO: 8123 - DNA, 142 bp, Protomyxzoa rheumatica
tgtgtgctttcatctcacagagataaacctttgttttgattgagcagtttttaaactctcttttcgtagcttctgcaagtggacatttggagcgctttggggcctatggtggaaaaggaaatatcttaaaataaaaactaga

SEQ ID NO: 8124 - DNA, 147 bp, Protomyxzoa rheumatica
cgctctgtggcccatagtggaaaaggaaatatcttcataaaaaaaataaacagaagcactttgagaaacttctctgtgttgtatgcagtcatatctcagacatgaaactttctttggtacagcagttttaaaacactctttttggag

SEQ ID NO: 8125 - DNA, 154 bp, Protomyxzoa rheumatica
ccattcgattccattccactcgggttgattccactccatctcattgcattacattccatttcattccactcggattgattccattccgttccattccattccactcctgttgattccaatccgttcctttccatttcattccattccattccat

SEQ ID NO: 8126 - DNA, 181 bp, Protomyxzoa rheumatica
tttgaaacactctttttgtagaatctgcaagtggatatttagagtgatttgaggcctattgtggaaagggaaatttcttcaactaaaaactacccagaagcattctgtgaaacttatttgcgatgtgtgcattcaactcacattgttgaaggtatctgttgattgagcagtttagaatctc

SEQ ID NO: 8127 - DNA, 158 bp, Protomyxzoa rheumatica
tgtgtaggaaaaggacatatattcatataacaactacacagaagcattctgagaaacatctctgtgatgtgcgcattcatctcacagagttaaacctttcttctgatggagcagtttggaaacactctatttgtagaatctgcaagtggatatttgga

SEQ ID NO: 8128 - DNA, 259 bp, Protomyxzoa rheumatica
tccactcgggttgattcaattccattctattccattccattctattccatttcattccattctactcgggtggattccattactttcatttccattcgattccattccattccattccactccattcccttcctttcgttccattccaatgaaacccactcgggttgattccattccattccatcccattccattgcactccattccattccgttcctttccactcgggttgattcaattccattctattccattccat

SEQ ID NO: 8129 - DNA, 122 bp, Protomyxzoa rheumatica
gattctacaaaaagactgattccaaactgctcaatcagaagaagggttcaattccgtgtggcaaacgtgcacatcaccaaggaatttgtcagaaagcttctgtctactttttatgtgaagat

SEQ ID NO: 8130 - DNA, 313 bp, Protomyxzoa rheumatica
gaaatcctcaaagctatccaaatatccacttgcagattctacaaaaagattgtttcaaaactgctgtgtcaaaaggaaggttcaactctgatacttgagtacacacatcaaaaagaagtttctgagaatgcttgtttctggttttcatgagaagatatttcctttttcaccataggcctcaaagcgctgcaaatgtccacttccaagtattacaaaaagagtgtttcaaacctgctctatgaaaggaagttttcaactctatgagtggaatgtaaacatcacagagatgtttccgagaatgcttctgtcttga

SEQ ID NO: 8131 - DNA, 124 bp, Protomyxzoa rheumatica
tgaatggaatggaatggaatggaatgcaatggaacggtgaaatgaaatgtgagctaagattgtgccattgcactccagtctgggtgacagagtgagacccagtcaaaataaactaatggaatgc

SEQ ID NO: 8132 - DNA, 125 bp, Protomyxzoa rheumatica
gagtctgtgtgtcctcatagtcctcaaaaggttcccaaatatttcttcacagattctccaaaaagagtgtttccaagctactgaataaaaagacatgtgtaactctgtaactcaaatccacactt

SEQ ID NO: 8133 - DNA, 151 bp, Protomyxzoa rheumatica
cgttccgttccgttccgttccattccattccattccgttccattccactcctttccattccattcctttccttcgaccggatctcactgtttctcccaggctggagtgcagtggcacaatctcagctcatatttcatttcatcattccatt

SEQ ID NO: 8134 - DNA, 147 bp, Protomyxzoa rheumatica
gcagttttgaatctctttttgcagaatctgcaagtggattttggagagctttgaggcctattggggaaaagcaaatatcttcatgtaaaaactacacagaagcattttgagaaacttctttgtgatgtgtgcattcaaatcacagag

SEQ ID NO: 8135 - DNA, 139 bp, Protomyxzoa rheumatica
gtatttcaaaactgatccataaaaaggaaagttcaactctgtgagatgaatgcacatgtcagaaagaaggttgtcagaatgcttctgtctagtttctatatgaagatatttccttttgcaacataggcctaaaagctct

SEQ ID NO: 8136 - DNA, 150 bp, Protomyxzoa rheumatica
ggaaaagggaatatggtcatacaaaatctagacagaagcattctcacagatttctttgtgatgtgtgtcctcaactaacagagttgaacctttcttttgatgcagcaatttggaaacacccttttggtagaaactgtaactggatatttg

SEQ ID NO: 8137 - DNA, 126 bp, Protomyxzoa rheumatica
taactcttgtgttggatctgcctatgagggcattgtgacatatttctgcactgatcacccagttgttgggacacttttctaggctctgtgtatgggggctttgtgacatacctctgcactgatcac

SEQ ID NO: 8138 - DNA, 354 bp, Protomyxzoa rheumatica
ggaatggaatggaatggagtggagtggagtggagtggaatagaatggaatggaatataatggaatggaatggaatgtaaagtaatggaatagaatggtgaaatgaaatgtgaactgaaattgtgtcactgtactccagcctgggtgacagagtgagatcctctcaaaacaaagaaatggaattgaatggagtataacggaatgtaatggaatggagtagagtgaaatggagtggagttgagtggaatggagtctaatggaaccggatggaatggagtggagtggtgtggagtgcagtggaatggaattgaatggagtggagtggaatggaatggaatggaatggagtggaatgg

SEQ ID NO: 8139 - DNA, 88 bp, Protomyxzoa rheumatica
tccctcacataggactccagaacactcctgctatggtctgaatgttggtccctcacataggactccagaacactcctgctatggtctg

SEQ ID NO: 8140 - DNA, 122 bp, Protomyxzoa rheumatica
aaattatgtattatatactgtacataaaatatccaagtaccgaaagtatgtgttatatactgcacatacaatatcaaagtacccaaactatatattatgtactgtacataaaatatcaaagt

SEQ ID NO: 8141 - DNA, 93 bp, Protomyxzoa rheumatica
cctgttttggaaaaggaaatatcttcaaattaaaaccacacagaagcattctgagaagcttctttgtgatgtgtgcattcaactctcagagtt

SEQ ID NO: 8142 - DNA, 211 bp, Protomyxzoa rheumatica
gtatataatatatattttgggtactttgatattttatgtacaatatataatatacagtttgggtactttgatattttatgtactgtatagaatatatagtttgagtacgttgttattttatgtacagtttattataaatgtttgggtactttcataatttatgtacagtatattatacatattttgggtactttgatattttatgtacagt

SEQ ID NO: 8143 - DNA, 172 bp, Protomyxzoa rheumatica
aaaaatcgtgtttccaaactgctctgtcaaacgaaatgttcaactctgtgagttgaggacacacatcacaaacaagtttctgcgaatgcttctgtctagtttgcatgggaagatatttccttgttcaccacgggcctgaaagcgctcgaaatgtccacttccagatactgca

SEQ ID NO: 8144 - DNA, 125 bp, Protomyxzoa rheumatica
acatcccaaagaagtttctgagaatgcttctgtctagattggatctgaagacaatcccgtttccaacgaaatcctcaaatctatgcaaatatcctcttgcagattccagaaaaagagtgtttcaa

SEQ ID NO: 8145 - DNA, 222 bp, Protomyxzoa rheumatica
aagggaatgtaatcgagtggaatggaaaggaatggaatcaacccgagtgcaatgtaatgtaatgtaatgtaatggaaaataatgtaatggaatggaatggaatggaatggaatggaatctaccagaatggaatggaatggaatgtacccgaatggaatggaatcgtatggcgtggcatggaatgaaacgtaatagaatggaatggaatcaaatcgcgtggaa

SEQ ID NO: 8146 - DNA, 129 bp, Protomyxzoa rheumatica
tattctgtacataaaatatcaaagtacaccaagtatatataatatactgtacataaaatattaaattacccacaatatgtattttattctgtacataaaatatgaaagtaaccaatcatttataataaa

SEQ ID NO: 8147 - DNA, 152 bp, Protomyxzoa rheumatica
caaaactgagtttcaaaagtgctctattgaaaggaagcttcacctctgtgggttgaaggtacacatcacaaagaagtttctgagaattcttctgtctagttgtaaatgcagaaatcacgtttcaaacgaaggccacaaagaggtccaaatat

SEQ ID NO: 8148 - DNA, 122 bp, Protomyxzoa rheumatica
aatggaatcatcgaatggagtcgaatggaataatgattgaacggaatcaaacggaatcatcatcggatggaaacgaatggaatcatcatagaatggaaatgaaaggagtcatcatctaatgg

SEQ ID NO: 8149 - DNA, 149 bp, Protomyxzoa rheumatica
ctttcaggtctatagtgagaaaggatatatcttcaaataaaaactagacagaagagttctgataaacttgtttgcgaagtgtgaactcaggtaacagaggtggatctttcttttgatacagcagttttgagaaacactttgttgaatct

SEQ ID NO: 8150 - DNA, 81 bp, Protomyxzoa rheumatica
gagtggaatagaatggtgaaatgaaatctgagctgagattatgcctctgcactccatcctgggtgacagagtgagatcctg

SEQ ID NO: 8151 - DNA, 149 bp, Protomyxzoa rheumatica
atattttatgtacagtatataagctatatttgatgtactttcatattttacgtacataatataatatatatttgatgtaatttcatatcttatatacagtatataatgtatagtttgggtaccttgatattttatgtacagtatagaat

SEQ ID NO: 8152 - DNA, 175 bp, Protomyxzoa rheumatica
gcctcacagtgctccaaatatccacttttagtttctgcaaaatgagagattcaaaactgctcaataaaaagaaacgttcaactctgtgtgatgaatgcactcatcacaaacaagtttctctgaatgcttctgtgttgtttgtatttgaagatatttccttttccaccatagggcg

SEQ ID NO: 8153 - DNA, 143 bp, Protomyxzoa rheumatica
agccccctgtaggcagagcctagtcaagagttatatctcctgggtgatcagtgcagttatatgtcacgatgtcgtgtagccagagcctagactaaagttacagcaccttggagaacattgcagatatatttcacaatgcccct

SEQ ID NO: 8154 - DNA, 197 bp, Protomyxzoa rheumatica
tgtgacatatctctgcactgatcacccaggtgattcaactcttgtctaggatctgcctacaggagtattgtgaaatatctctacactgatcattaggggatataactgttgtctaggccctgcctccaggggcgtttccacatatccctgaactgatgacaaacgtgatgtaacccttgcctaggctttgcctacag

SEQ ID NO: 8155 - DNA, 156 bp, Protomyxzoa rheumatica
aatgcaatggactcgaatggaatggactggaacaaaatgggatgaaatggattggaatcgaacggaacggaatgtaatggtatggaatggaatgcactcgaatggaatggagttgaaatgaatggaatcgaatggaacggaattgaatggaatcga

SEQ ID NO: 8156 - DNA, 237 bp, Protomyxzoa rheumatica
aaagagtgtttcataactggtctatcaaaagaaaggttaaactccgtgagttgaacgcacacatcacaaagttgtttctgagaatcattctgtctagtttttctacgaagatattgccttttccaccataggcctcaaacggcgctaaatatccacttgggaattctacaaaaagagagttacaaaactgctctatcgaaaggaagctgcaactctgcgagttgaaagcacacatcg

SEQ ID NO: 8157 - DNA, 347 bp, Protomyxzoa rheumatica
tttggaaacactctttttgtagaatctgcaggtggatattcggatagctttgaacgtttcgttggaaacgggaatatcttcatataaaatctagacggaagcattctgagaaagtgatttgtgatgtttgcattcaagtcacagagttgaatattcccttttatagagtaggtttgaaacactctttcggcactacctggaagtggatatttcgagctctttgaggcctatggttaaaaggaaatatcttcccataaaaactagacagaagccgtctcagaaacttgtttgtgatgtgtgcattcaactaacagagctgaacatttctgttacagagcagttttaaa

SEQ ID NO: 8158 - DNA, 239 bp, Protomyxzoa rheumatica
ccttcgttggaaacgggatttcttcttataattcttgacaaaagaattctcagtagcttccttgtgtgtgtgtattcaactcacagagttgaacctgcctttaggcagagcagattggaaaccctctttttgtggaatttgcaagtggagaattctagcgctttgacgccaatggaaggaaaggaaatatctccgtataaaaactagacagtatcattctcagaaactactttgtgatg

SEQ ID NO: 8159 - DNA, 198 bp, Protomyxzoa rheumatica
aagtatgtattatatactgtacataaaatatgaaagtaccgaaacatttataataaattgtacataaaatatcaaagtactcaaactacatattatatacggtatataaaatatcaaagtacccaaactgtatattatatactgtacatactatattaaagtacccgaatatatagcatactgtacataaaatatcaa

SEQ ID NO: 8160 - DNA, 313 bp, Protomyxzoa rheumatica
actagacagaagcattctcagaaacttctttgtgatgtgtgtcctcaactgacagagttgaacatgtcttttgagagagcagttttgaaacactctttctgtggaacctgcaagtggatatttggctggctttgacgatttcgttggaaacgggaatacatataaaaagcagacagcagcgttctgagaaactacttggtgatgtttgcattcaagtcacagaatggaacgttccctttcacagaacaggtttgaaacactccttttgtcatatctggaagtgtccatttggagcgcattcaggcttgtgttg

SEQ ID NO: 8161 - DNA, 125 bp, Protomyxzoa rheumatica
ctacctgaactatcaaagaaaggttcaacactgtcagttgaatgcacacatcacaaagaagtgttcagaatgcttctgtatagtttttatgtgaatatatatccttttccaccgtaggcctcaaa

SEQ ID NO: 8162 - DNA, 123 bp, Protomyxzoa rheumatica
agaacattgatgctggggtctgaatgtttacccttaacttaggatttcagaacgctgctcctggggtctgaatgtttgtcccttacacagtattccagaacactgctacgagggtctgaatgt

SEQ ID NO: 8163 - DNA, 124 bp, Protomyxzoa rheumatica
gcagagatctatcaaaattccctgtaggcaatgcttataaaagtgttacatcacctaattgatcagtgtagagatatgtcacaaagctcccgtaggaagaacttagatgagttacatcacctga

SEQ ID NO: 8164 - DNA, 133 bp, Protomyxzoa rheumatica
atactgtatataaaatatgaaggtacttcaaatatatattctatgctgcacataaaatatcaaagtacccaaagtatgcattatatactgtatataaaatatcaagatacccaaagtatgtattatatactgt

SEQ ID NO: 8165 - DNA, 258 bp, Protomyxzoa rheumatica
ttgacagaagaattctcagaaacttctttgtgatgtgtgcatttaactctcagagttcaaccttccttttgacagaagagtgttgaaatattctttttctagagtttccaagtgaatatttagagcggtttcaggcctatgtagaagagaaaatatcttcacagagaaactagacataattgttctctgaagctactttgtgatgggcgccttcagctgacagagtttaacctttctttggatagagcggttttaaac

SEQ ID NO: 8166 - DNA, 124 bp, Protomyxzoa rheumatica
cattagatgattccattagattctattcagtgttgatgctattcgtgtccattagatgattccattctattccattcgatgatgagtccattctagtcaattcaatggtgattccatttgggtc

SEQ ID NO: 8167 - DNA, 163 bp, Protomyxzoa rheumatica
tatattcgggtactttgatatattatgtacagtatataatgtacagtttgggtactttgatatttaatatactgtatacaatatgtagtttgtgtactttgatattttatgtagagtttactataaatgtttggttactttcatattttatgtacagtatata

SEQ ID NO: 8168 - DNA, 274 bp, Protomyxzoa rheumatica
atggaagttaatcaacacgaatggaatggaacggaatggagtggaatagaatggaatggaatgaacccgaatggaatggaatggattggaatgcaatggaatggaatcaacctgagaggaaaggaatggaatggaatggagtggaatggaatggaatgtaacggaatggaatggaatggaatcaaaacgaatggaatggaacggaatgaaatggcaagggatggaatgcaatgggatggaagttaatcaacacgaatggaatggaacggaatgg

SEQ ID NO: 8169 - DNA, 146 bp, Protomyxzoa rheumatica
aagtggatatttggaactccttgaggatttctttggaaacgggttaaaattcacagaacaaaacagaagcattctcagaaagttctttgtgatgttggccttcaactcacagagtggaacattccttttgatagggcagttttgaa

SEQ ID NO: 8170 - DNA, 150 bp, Protomyxzoa rheumatica
atggaatcatagaatggacttgaataggatcatcatcgaatgaaatagaatgcaatcatcgaatggaatcgaatggaatcatcatcgaatgaaatcaaaggcaatgatcgaatggacccgaatggaatcatcatcgaatggaatcgaatg

SEQ ID NO: 8171 - DNA, 122 bp, Protomyxzoa rheumatica
aaatatatatttgatgtactttcatatttcatgtaccgtatataatacatgctttgggtactttgatattttttgtagagaatagaatatataccttgggtactttgatattttatgtacag

SEQ ID NO: 8172 - DNA, 147 bp, Protomyxzoa rheumatica
atcaaaaaaaaagttaaactctctgagttgaacgcacacatcacaaagtactttctgaggatcattctgtctagtttttctatgaagttatttccttttctaccatgggcctcaaacggcactaaatatccacttggaaattctaca

SEQ ID NO: 8173 - DNA, 156 bp, Protomyxzoa rheumatica
attctcagtaacttctttgtgttgtttgtattcaactcacagatttgaaccttcattaagagagagcagatttgaaacactctttttttggtatttgcaagtgcagattccaagcgcttctaggcctatggcagaaaaggaaatatcttcgtataa

SEQ ID NO: 8174 - DNA, 126 bp, Protomyxzoa rheumatica
gatcagtgtagagatatgtgaaatttcccatgtagacagagcctagacaagtgttacatctcctagtgatctgtgcagggataagtcgtaaagcctcttgtaggcagagtgtagacaagtgtttcc

SEQ ID NO: 8175 - DNA, 184 bp, Protomyxzoa rheumatica
atttggcctaaaagcgcttgaaatctccacctgcaaatatcacaaaaagagggtttcacacctgctctgtctaaaggacagttcacctctgtgagttgaatagaggcagcacaaagaagttactgagtattcttctttctagcgttacatgaagaaatcccgtttccaacgaaggcctcaaaga

SEQ ID NO: 8176 - DNA, 186 bp, Protomyxzoa rheumatica
gatttgagttctgttttgtcgaacgagatatcttcatataaaagctacacagaagatttctgagaaacacctttgtgaggtgtgcattgaagtcacagtgttcaacctatcttttgattcagcagatttgaatctctctttttttgcagaatctgtgagtggatatttggagcgctttggggccta

SEQ ID NO: 8177 - DNA, 254 bp, Protomyxzoa rheumatica
tgtttccaaactactctatgaaaagaaagcttaaactccttgagttaaacgcacacatcacaaagtagtttctgagaatgattctgtctagtttttacacggagatatttccatttcaaagattggccttaaatcgcatgtaatctccacttccaaattccacagaaagagtttttcaaaactgctctgtctaaatgaaggttcaactctgtgacttgaatgcacacaacacaaagaagtgactgagaattctt

SEQ ID NO: 8178 - DNA, 124 bp, Protomyxzoa rheumatica
tttagaactctttgtcactttcgttagaaacatgatttcttcgtataaaacttcacagaagaattctaagaaacatctttgtgatgtgtgctttcaactcacagagttgaacattcctcttgat

SEQ ID NO: 8179 - DNA, 166 bp, Protomyxzoa rheumatica
atacagcagtttggaaacactctttttgtagaatctacaagaggatattttgagagcattgaaaatttcgttggaagcgggaaaaccttcatataaaatctagacagcagcattctcagaaacttatttgtgatgtttgcattcaactcatagagttgaacattcc

SEQ ID NO: 8180 - DNA, 147 bp, Protomyxzoa rheumatica
gaatggaatggaatcaaatagaatggacgcgaatggaatgttctcaaacggaatttatgaaaatagaatggaatcgaaagtcattgaacattatggaatggaatcaaatggaattaaatcgaatggaaggaaccggaatggaatgta

SEQ ID NO: 8181 - DNA, 181 bp, Protomyxzoa rheumatica
cttcttttcatagagcactttggaaacactcagtttgtaatgtctgcagctggatatttggacctctttgaggccttcgtagtaaacgggatttcttcgtgtaatgatagacaatagaattctcagtgaatttttttctgtgtgtgtgtatttaactcacagggttgaaccttcctctaga

SEQ ID NO: 8182 - DNA, 200 bp, Protomyxzoa rheumatica
ctgctgtctgctttttatatgtattcccgtttccaacgaagtcgtcaaagccagccaaatatccacttgcagattccacaaaaagagtgtttcaaaactgtcctgtctaaagaaaagttcaactgtgttagttgaggacacacatcagaaactagtttcggagaatgcttctgtctagttgttatgggaagatatttcct

SEQ ID NO: 8183 - DNA, 161 bp, Protomyxzoa rheumatica
cgtgcagactttccaaacagagtgtttccaaactgctgaatgaaaagaaagttaaactctgtgagttgaacacacacatcacagagcagtttctgagaatgattctctctagtttttataggaaaatatttccttttctgcttttggcctcaaagcgcttg

SEQ ID NO: 8184 - DNA, 125 bp, Protomyxzoa rheumatica
gactcttgtctaagctctgcctagagggacattgggacatctctctgcactgatcgctgtggtgatgtaaaacttgtctaggctttgcttacagtgggatttatgaagtatctctgcactgatca

SEQ ID NO: 8185 - DNA, 243 bp, Protomyxzoa rheumatica
atagtttgggtaccttgatattttatgtacagtatagaatgtatatttggtgtactttgatattttatgtagagaataaaatatatatttcatttactttcatattttatgtacagcatataatatatgctttgggtagtttgatattttttgtacagtatggaatatataccttgggtactttgaaattttatgtgcagtatataatatatagtttgagaactttgatatttcctgtacagt

SEQ ID NO: 8186 - DNA, 150 bp, Protomyxzoa rheumatica
cattccattccattcccctgcactcgggttgattccattcgattccattgcattacattccgttccattccgttccatttcattctattcgggttaattccattccattgcattccactccattccagtcctttccattccattccactc

SEQ ID NO: 8187 - DNA, 148 bp, Protomyxzoa rheumatica
caaataagtttctgacaatatttctgtctagtttttatgtgaagatatttactttcctactgtaggcctcaaaaggctctaaatatacacttgcaaattccacaaaaagagtgtttccaaactgctctctcaaaggaagtttaaactc

SEQ ID NO: 8188 - DNA, 298 bp, Protomyxzoa rheumatica
taaaaactagacagaagcattctcagaaacttgtttgtgacgtgcgtattcaactaacagagttgaacctttctttttacagagcagctttgaaaccctgtttctgtggaatctgcaattggaaatttcgatggttctgaggatttcgttggaaacgggattacaaatagaaagtagacagcagcattctcagaaactgctttgtgatgtttgcattcaagtcacctagttgaacattccctttcatagagcaggtttgaatcactgtttctgtcgtatctggaagtggatatttcga

SEQ ID NO: 8189 - DNA, 150 bp, Protomyxzoa rheumatica
aaccccctgtaggcagatccaagacaagagtagaatcacctgggtgatcagtgcagacatatttcacaatgcccactttgggcagagggtagacaatagtgacatcacctaggtgatcagtgtagagatttgtcaaaattccctgtaggc

SEQ ID NO: 8190 - DNA, 235 bp, Protomyxzoa rheumatica
tcaatcaaacaaaggttcaactctgtgtgatgaacgcacacataaaaaagaagtttcgcagagttgttctgtctagtttttatgtgaagatatttccctttccaccttaggcctcaaagtgctcccaatgtccaattgcagattcaacaaaaagagagtttcaaaactgctcactcaaaagaaaggtttcactcagtgagataaatgcacacatcacagagaagtttctaagatt

SEQ ID NO: 8191 - DNA, 132 bp, Protomyxzoa rheumatica
aaaaggaatcatcatcaaatggaaacgaatgaatcatcatcaaatggaacccaacggagtcatcatcgaatggaattgaatggaatcataattgaattgaatcaaatggaatcatcattgaatggaatcgaa

SEQ ID NO: 8192 - DNA, 165 bp, Protomyxzoa rheumatica
cagaatgcttctgtgtagtttttatgtgaagatatttccttttgcaatatatgccacaaaggcctccaaatacccattccagactcttcaaaaagagagtttcaaaactgctccatcaaaagataggttcaactccatgagatgaatgcacacatcacaaaaagt

SEQ ID NO: 8193 - DNA, 134 bp, Protomyxzoa rheumatica
tgcggagatatgtctcaatccccctgtgggaacagcctacacaagggttacatcacctcgggtaacagtgcagagatatgtcacaataccccctgtaagcacagcctagacaagagttacatcacctgggtgat

SEQ ID NO: 8194 - DNA, 185 bp, Protomyxzoa rheumatica
aaagcctggagaatatttacatctcctggatgatcagttcagaattatgtcacaatgccccctccctgtggagcctaggaagagttccatcatttgggtgatcagtgcagagatatatcacaaggtcctctatatgaaactcctggaaatgatttacatcacctcggtgatctctgcataggtat

SEQ ID NO: 8195 - DNA, 150 bp, Protomyxzoa rheumatica
ctatcttttgataagcagttttgaaactctgtttttttggaatctgcaggtggatatttggagccctttgaggcctatggtgtaaaaggaaatatcttcccataaaaactcacagaagcattcaaagaaacttctttgtgatgtgagcat

SEQ ID NO: 8196 - DNA, 252 bp, Protomyxzoa rheumatica
tgaacatggcctttcatagagcaggtttgaaacactctttatgtagtttgtggaagtggacattttgatcgccttgacgcctacggtgaaaaaggaattatcttcccataaaaaatagacagaagcattctcagaaacttgttggtgatatgtgtcctcaactaacagagttgaactttgccattgatagagagcagttttgaaacactccttttgtggaatctgcaagtggatatttggatagcttggagg

SEQ ID NO: 8197 - DNA, 161 bp, Protomyxzoa rheumatica
aaagcatatatcttaatataaaaactactcagaagcattctgagaaacttctttgtgatgtgtatattcatctcacagagttgatcctatcttatgattcagcagttttgaaacactgtttttgtagaatctgaaattagatatttggagtgctttgaggc

SEQ ID NO: 8198 - DNA, 126 bp, Protomyxzoa rheumatica
ttgattccattccattgcattccattccattccattcaataccattccgtcccattccattccattacattcggaatgattctattcaattcctttactctccattacattccattccattcgggt

SEQ ID NO: 8199 - DNA, 130 bp, Protomyxzoa rheumatica
gatataactcttgtctaggctctgcctacaatggtcttgtgacacatctctgcactgatcacccaggtgatataactcttctctaggatgtgaccacagggtgctttgtgacatatccctgcaatgatca

SEQ ID NO: 8200 - DNA, 145 bp, Protomyxzoa rheumatica
aaatcccgttttcaatgaaggcctgaaaatgatcaaaatatacacttgcagatactacaaaaagagtgtctcaaaactgctctatcaagaggaatgttcaactctgttggttgaatgcaaatatcactaagtagtttctgacaat

SEQ ID NO: 8201 - DNA, 228 bp, Protomyxzoa rheumatica
tctcagaaacttgtttgtgatgtgtgtattcaactaacagacttgaacttttgtttttacagagcagttttaaaacaatctttttgtggaatcagaaagtggatattcggatggctttgaggacttcgttggaagcgggattacatataaaatctagagagaagcattctcaggaacatctttgtgatgtttgcattgaagtcacagaattgaacattcactttgata

SEQ ID NO: 8202 - DNA, 135 bp, Protomyxzoa rheumatica
tatttggggctgtttgaggatttcgttggaaatgagacaccttcaattaaaaactacagagaagcattctcagaaactgcattgtgatgtgtgaattcaactcagagatgtgaacacttctttagaaagagcagt

SEQ ID NO: 8203 - DNA, 126 bp, Protomyxzoa rheumatica
tgtctacaggggggtttgtgacatatcattgcactgatcacccaggagatgaaactcttgtctaggctctgcctgcaggggctttttgacatatttcttcattgatcatgcaggtgatataactct

SEQ ID NO: 8204 - DNA, 191 bp, Protomyxzoa rheumatica
ctttttgtagaatttccaagtggatatttagcgccgcttgaggcctatggtggagaaggcgatatcttcatagaaaaactagacagaatgattctcagaaactactctgtgatgtgtgccttcaactcacagagtttaaccttccttttgatagagcagttttgaaaaactctttttgtagaatctgcaag

SEQ ID NO: 8205 - DNA, 170 bp, Protomyxzoa rheumatica
aaccttcctttagagagagcagatttgaaacactctttttgtggaagttgcaagtggagatttcagccgctttaacgtcaatggtagaaaaggaaatatcttcgcataaaaacaagacagaatcattttcagaaactgctttgtgatgtgtgcattcaactcacagagtt

SEQ ID NO: 8206 - DNA, 198 bp, Protomyxzoa rheumatica
agacatacgtcacaaagcagtttgtgagaatgcttctgtctaggttttatgggacgatatttcctttttcaccataagcgtccaagcgctccaagtgtccacatccagatactacagaaagtgtgtttcaaacgtgctctatgaaagggaatgttctactctgtgacgtgaatgcagatatcacaaagcagtttctga

SEQ ID NO: 8207 - DNA, 125 bp, Protomyxzoa rheumatica
actagagaaagactgtttcaaaactgctctatccaaagaacggttccactctgtgaggtgaatgcacacatctcaaagcagtttctgagaactcttctgtctagtttgtatgtgaacatatttcc

SEQ ID NO: 8208 - DNA, 123 bp, Protomyxzoa rheumatica
caactcacagagttgaaccttcctttcgagagagcagtttcaaaacaatctttttgtagaatttccaagtgcatatttagagtgcttcgaagcctatggtagaaaacgaaatatcttcatata

SEQ ID NO: 8209 - DNA, 116 bp, Protomyxzoa rheumatica
atatccacttgcagatactacaaaaagactgtttcaaaacctccctctccaaaggaaagttcaaatctgtcggttgaatgcacacatcacaaagcagtttctgagaatgcttctgt

SEQ ID NO: 8210 - DNA, 127 bp, Protomyxzoa rheumatica
tgattctgtctagtttttctacgaagatatttccttttctgccataggcctcaaagtgctctaaatatccacttggaaattcaacgaattgagtgtttcaaaacggccctatcgaaaggaatgttcc

SEQ ID NO: 8211 - DNA, 127 bp, Protomyxzoa rheumatica
ggttctgagaatcattctgtctagtttttctatgaaggtattaccttttctaccacaggcctcaaacggcgctaaatatctacgtagaaatttcacaaaaagagagtctccaaactgctctatcgaa

SEQ ID NO: 8212 - DNA, 133 bp, Protomyxzoa rheumatica
tcaaaactcttctatcgaaaggaagtttcaactccatgagttaaatgcacagatcacaaataattttctgaggattcttctttcaaattttatatgaagaaatcccgtttccaaagatggcctcagaaaagtc

SEQ ID NO: 8213 - DNA, 137 bp, Protomyxzoa rheumatica
ccattccactctggttgattccattccttttcattccactcgaaaacatttccttctattccactcggaatgattccattccattccatttcgttctttccattctattccgtaccattccattccattccattcca

SEQ ID NO: 8214 - DNA, 233 bp, Protomyxzoa rheumatica
cacataaaaactagacagaagcattctcagaaacttctttatgaagtttgcattcaactcacagagttgaactttccgttccatacagcagttttgaaactctctttttctagaatctgtaagtggaaacttggagcgcttcgaggcctatggtgaaaaagggaatatcttcccatagaaagtagacagaagaattctcagtaactactttgtgatgtgtgtactcaactcac

SEQ ID NO: 8215 - DNA, 182 bp, Protomyxzoa rheumatica
aatgtaatggaatcggatggaatggaattgaatgtattggagtcgagtagaacagaattgaatggaatggcatcaaatggaatggaaacgaaaggtatggaattgaatggactcaaatgttatggaatcaaagggaatggactcaaatagaatggactcaaaagaaatggccttgaatggaa

SEQ ID NO: 8216 - DNA, 125 bp, Protomyxzoa rheumatica
tgagctgaacacacacatcaaaaagaagtttctgtgaaagattctgtctagattttataagaagatgcttccttttctacagctgcaaattccacaaaaagagtgtttaacatctgctcttctaa

SEQ ID NO: 8217 - DNA, 185 bp, Protomyxzoa rheumatica
actttcttttgatagagcagtgttgaaacacactttttgtagaatccacaagtattcgtttggagcgctttgttgcctatgtgggaaaaaggaatatcttcacttaaaaactagacagaagcattctctgaaactcctctgtgaagtgtgtgttcaattcacatcgttgaacctttcttttgata

SEQ ID NO: 8218 - DNA, 246 bp, Protomyxzoa rheumatica
catattttgggtactttgatattttatgtaccgtatataatatataattgatgtactttgatatattatgtacagaatataaaatatatttgaagaacctacatattttatgtacagaatataatatataatttgtgtaatttgatattttatgtacagtatgtaatgcatactttgggtactttgatattgtatgtgcagcatataatatatatttgaagtaccttcatattttatatacagtat

SEQ ID NO: 8219 - DNA, 211 bp, Protomyxzoa rheumatica
actttgatattttatgtacagaataaaatatatattttatttactttcatattttatatacagtatataatacatgctttggatactttgatattgtttgtacagtatagaatttataccttgggtactttgatattttatgtgcagtatataatatatagtttgagaacgttgatatttcatgtacagtataaaatatatatttggggta

SEQ ID NO: 8220 - DNA, 134 bp, Protomyxzoa rheumatica
tgtatataatatgtagattgagtactttgatattttatgtacagttcattataaatgtttggttactttcatgttttatgtacagtatataatgcatattttgggtactttgatattttatgtaccgtatataa

SEQ ID NO: 8221 - DNA, 136 bp, Protomyxzoa rheumatica
agtggaaagaagggaatggaatcaacccgagtggaatgcaaggcaatggaatgaaatggaaaggaatggaatgtaatcaactcgattacaatggaatggaatggaatgaaatggaatggaaaggaatggaatggaa

SEQ ID NO: 8222 - DNA, 82 bp, Protomyxzoa rheumatica
atcttcatatcaaatctagacagaagcattctcagaaacgcctttgtgatgtttgcattcaactcatagagttgaacattcc

SEQ ID NO: 8223 - DNA, 178 bp, Protomyxzoa rheumatica
tacagtttattataaatgtttgggtactttcatatattaagtacagtgtataatacatattttggctactttgatattttttgtacggtacataatatatactttgggtactttggtaatttatgtacagtatacaatatatattttgggtattttgatattttatgtacagtatata

SEQ ID NO: 8224 - DNA, 131 bp, Protomyxzoa rheumatica
tcaaatgtaggcctcaaatcgctccaaatatccacttgcagattgaacaaaaagagagattcaaaactggtcactcaagagataggtccagctctgtgagttgaatgcaaacctcacaaagatgtttctca

SEQ ID NO: 8225 - DNA, 81 bp, Protomyxzoa rheumatica
ttaaactctgtgagttgaaggcacacatcagaaactagttcctgcgaatgactctgtgtagttttactacgaagatatttc

SEQ ID NO: 8226 - DNA, 116 bp, Protomyxzoa rheumatica
aataaaaaggaagattcaactctgtgtgaggaacgcattcgtcacaaagaagtctctctgaatgcttctgtgtagtttttatatgaagatatttccttttacaccacagggtgcaa

SEQ ID NO: 8227 - DNA, 212 bp, Protomyxzoa rheumatica
tgtacagtatgtaatatatattttgagtatttggatatttcatgtacagtatataatgtttattttgggtcctttgatattttatgtacagcatataatatgtattatcggtactttgatattttatgtactgtatataatacatatttggggtactttcatattttatgtacagtataaaatatgtattttggctactttgatattttatg

SEQ ID NO: 8228 - DNA, 204 bp, Protomyxzoa rheumatica
tttgatattttatgtacagtatataatgcatactttgggtacattgatgttttatgtacagtatataatacatacttagggtactatgacattttatgtacagtacataatacatactttggatactttcttattttaaatacagtatgtaatacatattttgggtactttgacattttatgtacagtatataatacatacttt

SEQ ID NO: 8229 - DNA, 167 bp, Protomyxzoa rheumatica
tttccattcatctctaatagttgaccatttcctttcattgagcagtttggaagcagtctttttctacaaactgcaaagggatatttctgagcggtttggggccaacggtgaaaaataaatatcttcccatgaaaactagacagaagcattttgagaaacttcttttt

SEQ ID NO: 8230 - DNA, 103 bp, Protomyxzoa rheumatica
ctattccattccattgcaatcgagttgaatccattgcattccattcaattccattccggaaggttccattccattgcattccattccattccattcccctgca

SEQ ID NO: 8231 - DNA, 154 bp, Protomyxzoa rheumatica
gagatttggaccgctttgaagcctatggcagtagaggaaatcactgcccatgaaatctagacagtagcattctcaggaaacactttgtgacgattgagttcaacccacagagctgaacattgcttttgatggagcagtttggaaacacactttt

SEQ ID NO: 8232 - DNA, 193 bp, Protomyxzoa rheumatica
tgcattcaactcacagagttgaaccttccttttgagagagcggttttgaaacagtctttttgtagtgtctgcaagtggatatttgcagtgatttgaggccgaagaaggaaaaggaaataccttcaaataaaaaactagacggaagcattttcagaaactgccttgtgatgtgtgcattcaactcacagagttg

SEQ ID NO: 8233 - DNA, 81 bp, Protomyxzoa rheumatica
acccaccaatgtatcacaatctccttccaaacaaatcctaaaaaacaaaagaagagtaacatgaggtaggtgctgggcaca

SEQ ID NO: 8234 - DNA, 152 bp, Protomyxzoa rheumatica
gaatgttcaattctgtgacttgaatgcaatcaccacaaagaactttctgagaatgctgcagtctgctttttatatgtaatcccgtttccaacgaaatcctcaaatctagcccagtatccacttgcagattccacaaaaagagtgtttcaaaa

SEQ ID NO: 8235 - DNA, 132 bp, Protomyxzoa rheumatica
taatacatgatttgggtactttgatattttttatgcagtatagaatatatacctagggtactttgatattttatgtacagtatatagtatacagtttgtgaactttgatatttcatgtagagtatataatat

SEQ ID NO: 8236 - DNA, 130 bp, Protomyxzoa rheumatica
agtttttatgggaagatatttcctttttcaccgtaggcctcaaagcactccaaatgtccactttcacatactacaaaaagagtgtttcaaacctgttgtatgaaagggaatgttcaactctatgagttga

SEQ ID NO: 8237 - DNA, 124 bp, Protomyxzoa rheumatica
gatcactctttttgtagaatctgcaagtggatatttggagcattttggagtctatggtgtaaaagtaaatatctacacataaaaactacacagaagaattctgagaaaattctttgtgatgtgt

SEQ ID NO: 8238 - DNA, 124 bp, Protomyxzoa rheumatica
gaatgtaatggaatggaatggaatcaactcgattgcaatcgaatggtatgaatggaatggaatcaactcgattgcaatccaatggaatggagtgcaattaacccgaatagaatggaatggaatg

SEQ ID NO: 8239 - DNA, 136 bp, Protomyxzoa rheumatica
agccccatcacctggatgatcagtacagggttatgtcacaaagttactttaggcagatcctagacaagggttacatcacttggatgattagtgcagagatatgccacaatgccatcgtaggcagagcctagacaaa

SEQ ID NO: 8240 - DNA, 160 bp, Protomyxzoa rheumatica
gaatggaatggaatggaatggaatggaatagaatggaatgaacccgtgtgcaatgtaatggaatggaatggaatggaatggtttcaactcgaaaggaatcaactcgatttcaatggaatggaatggagtggaaaggaatagaatggaatcaacccgagtg

SEQ ID NO: 8241 - DNA, 97 bp, Protomyxzoa rheumatica
ttgtatttcattcgattccattctattcaaataaattccactcgagaccattcctttgagtccattctatttgagtccattccattcgagtccatta

SEQ ID NO: 8242 - DNA, 171 bp, Protomyxzoa rheumatica
gatgctgctgtctactttttatacgtaatcccgtttccaaagaaatcccccaagctatccaaatatccacttgcagattccacagaaagactgtttgaaatctgctctgtcaatagaaaagttcaactctattagctgcgtgcatatatcccaaagaagattctgagattg

SEQ ID NO: 8243 - DNA, 172 bp, Protomyxzoa rheumatica
tgattccatttgattccattcaatgatgattccattcgattccattcgatgatgattccattcgtttccatccggtgacgattccattcgattccgttgaatgtttattccactcgagtccattcgacgattccattcgattccatttgatgatgattgcattcgagtccat

SEQ ID NO: 8244 - DNA, 136 bp, Protomyxzoa rheumatica
attccattccattccattccattccattcaattcaagtcctttccattccattccactcgtgtttattccattttattagtttccattccaatcctttcccttccattccactctggttgattccattcctttcca

SEQ ID NO: 8245 - DNA, 161 bp, Protomyxzoa rheumatica
gaggacacacatcagaaactagtttctgagaatgcttctgactagttgttatgggaagatatttccttttccaacataggcctgaaagcgctccaaacgtccacttccagatacgacaaaaggagtgattccaacctgctctatgatagggaatgttcaac

SEQ ID NO: 8246 - DNA, 171 bp, Protomyxzoa rheumatica
attccattccattccactcgtgttgattccattcctttccgttccattcggtttgaagccattccatcccattcaattccattccattcctttccattccattcccctgtaatcaggtttattccattccattccattgcaatccatgccattccattcgtgttgattcca

SEQ ID NO: 8247 - DNA, 172 bp, Protomyxzoa rheumatica
catcaaatataaattatatactgtacataaaataccaaagaacccccaatatatattatatactgtacatgcaatatcaaagttcacaaactatatatcatatactgtacaaaaaatatcaaagtaccgaaggtatatattctatactgtacaaaaaatatcaaagtatgca

SEQ ID NO: 8248 - DNA, 191 bp, Protomyxzoa rheumatica
aaccttcctttagagagagcagatttgaaacactctttttttggaatttgcaagtgcagacttcaagcgcttctgggcctatggcagaaaaggaaatatcttcgtataaaaactacacagaatcattctcaacaaatactttgtggtgtgtgcgttcaactcacagagtttaacctttcttttcatagagc

SEQ ID NO: 8249 - DNA, 135 bp, Protomyxzoa rheumatica
atcgagttgattccattacattccattccattccattccactccattccagtcgtttccattgcattccactcgggttgattccaaagtattcctttccattgcattccattccattgcaatcgagttgattcca

SEQ ID NO: 8250 - DNA, 174 bp, Protomyxzoa rheumatica
atgctagacagaagaattcgcagtaacttcttttgggatgtatgtattcaactcggagagttgaaccttcctttagacagagcgcattggaaacacgctttttgcggaattttcaggtggagattccaagagccttgaggccaatggtagaaaaggctatcttcgtataaaaac

SEQ ID NO: 8251 - DNA, 133 bp, Protomyxzoa rheumatica
cattccattccattccactcgggttgattccattctattcttctccattccattccattcccttccattccactcgggttgattcaattcctttccattcaactcgattacattcccttccattccactcgga

SEQ ID NO: 8252 - DNA, 136 bp, Protomyxzoa rheumatica
tgcttctgtctaggttgtatgtgaagatatcccatttacaatgaattcctcaaagagctccaaatttaagcaagcagattctacaaaagcagtgtttcaaaactgcactaagaaaggaaaggttcaactctgtgaa

SEQ ID NO: 8253 - DNA, 164 bp, Protomyxzoa rheumatica
aagggaatatcttcacaaaaaactaggcagaagccttctcaggaacttcactgagatgtgtgcattcaactaacagagttgaaactgtcttttgaaagagcaggagtgaaacactccttttgctgtatctgactgtgtatatttggaactctttgagttattcg

SEQ ID NO: 8254 - DNA, 133 bp, Protomyxzoa rheumatica
tattatatactgtacataaaatatcaaaggactcaaaataaacattatatactgtccataaaatatccaaatactcaaaatatatattgcacactgtacataaaatatcaaagtacccaaattatgtattata

SEQ ID NO: 8255 - DNA, 208 bp, Protomyxzoa rheumatica
cattccactcgggttgattccattgtattcctttcaattccattccattccattcgattgcaatcgagtggattccattcgagttgaatccattccattccactccattccattccattgcacacgggttcattccattccattccattccattcccttccattccatttcgttacattccattctattccgtaccattccattccat

SEQ ID NO: 8256 - DNA, 128 bp, Protomyxzoa rheumatica
aattgccctggggagggaactcttgtctaggctctgcctacaggaggctttatgacttttacctgcactgattacctaggtgatgtaacacttgtgtagactctgcctacactggaattctcacatat

SEQ ID NO: 8257 - DNA, 124 bp, Protomyxzoa rheumatica
gtgcctcaaagctgctctctgaaacggaatgttcaactctatgatttgaatgcaaacatcacaaagacgtttctgagaatgcttctgtatactttttatgggaggatatttcctttttcaacac

SEQ ID NO: 8258 - DNA, 179 bp, Protomyxzoa rheumatica
tcgaagcgtttgaaatctgcactagcaaattccacggaaagaatgtttcacatctgctctctgtaaagaaaggttcaaccctgtgagttgaatacacacaacagaaagaagttactgagaattcttctgtctagtgttatatgaagaaatcccgtttccaacgaaggcctcaatgaagt

SEQ ID NO: 8259 - DNA, 176 bp, Protomyxzoa rheumatica
tgagaattcttctgtctagttgtaaatgaagaaatcacgtttcaaaagaaggccacaaagaggtccaaatatccacctgcagattctacaaaaagagtgtttccaaactgctccatcaagaggaatgttcaactcggtgcgttgaatgcaaatatcacaaataagtttctgacaat

SEQ ID NO: 8260 - DNA, 153 bp, Protomyxzoa rheumatica
tgtactttgatattttatgtacagaataaaatatatatttaatgttctttcatattttatatacagtatataaaacatgctttgggtattttgatattttttgtacagtatagaatatatgccttgagtactttgatattttatgtacagtat

SEQ ID NO: 8261 - DNA, 135 bp, Protomyxzoa rheumatica
agtttggaaacactctgtttgtaaagtctgcacgtggataatttgatcacttagaggccttcgttggaaaggggtttttttcatgtaaggctagacagaagagttctcagtaacttccttgtgttgtgtgtattc

SEQ ID NO: 8262 - DNA, 140 bp, Protomyxzoa rheumatica
taaaatatgaaagtaaccaaacatttataataaactgtacctaaattatcaaagtactcaaactacatattatatacagtatataaaatgtcaaagaacccaaactgtatattatatactgtacataatatatcaaagta

SEQ ID NO: 8263 - DNA, 153 bp, Protomyxzoa rheumatica
cttgggtactttgatattttatgtacagtatataatatatggtatgtgaactttgatatttcatgtagagtataaaatatatatttggggtacactgatattatatgtacagtatataatctatatttgatgtactttcatattttatgtacc

SEQ ID NO: 8264 - DNA, 185 bp, Protomyxzoa rheumatica
ttccattccaatccattccattccattccattccattccactcatgttatttccattccattccattccattccatttcattgcactcgggtggattccattccaatcgattccaatctattgcattacattccagtcttgatgtttccattccattcctttccattctattctataccaatcct

SEQ ID NO: 8265 - DNA, 132 bp, Protomyxzoa rheumatica
aatatcaaagtgcccaaattatgtattatatactgtacataaaataggaaagtacctaaacatttataataaagtgtacataaaatatcaaagtactcatactatattctgtacataaaatatcaattagga

SEQ ID NO: 8266 - DNA, 144 bp, Protomyxzoa rheumatica
tggaatcatctaatggaatggaaaggaataatccacggactcgaatgcaatcatcattgtacagaatcgaatggaatcatcgaatggactcgaatggaataatgattgaactgaaacgaatggaatcatcatcggatggaaacg

SEQ ID NO: 8267 - DNA, 130 bp, Protomyxzoa rheumatica
cacaaagctatccaattatccactttcagatttcacagaaagagtgttttaaaattgctctgtaacagaaatgttcaactctgttagttaaatacacacatcacaaacaagtttctgagaatgcttctgt

SEQ ID NO: 8268 - DNA, 140 bp, Protomyxzoa rheumatica
aggttcaaccctgtgaattgaacaactacatcacaaagtattttctcagaatgtttctgtctagtttttaggtgaagatatttctttttccaccatggggaagaaagcactccaaatgaacacttgcagattctacaaaa

SEQ ID NO: 8269 - DNA, 134 bp, Protomyxzoa rheumatica
aaatctccacttgcaaattccacaaaaagagtctttcaaatctgctctgtgtaaatgaaagttcaactctgtgagttgaacacaaccaaaacaaggaagttactgggaattcttctgtctagccttatatgaaa

SEQ ID NO: 8270 - DNA, 155 bp, Protomyxzoa rheumatica
cgaatggaatggactcaagaggaattgtctcgaatggaatttattcgaagagaatggaatcgaattgaatgcaacagtatggaatggaatcgaatgaaatggaattgaatggaattgaattgaatggaatggacaggaatggaatggactggaat

SEQ ID NO: 8271 - DNA, 203 bp, Protomyxzoa rheumatica
atactgtacataaaatatcaaagtacccaaagtatatattatatactgtacataaaacataaaataccccaaatatatatcatatgctgtacataaaatatcaaagtacacaaaatatgtattatgtactgtacatacaatataaaggacccaaaatatatactatatactgtacataaaatatcaaaatacccaaaatatat

SEQ ID NO: 8272 - DNA, 183 bp, Protomyxzoa rheumatica
agtatatggaagtagacgtttcggacggtttgaggcccatagtgataaagggaatatcttcccctacaagatagaaagaagcattctgtgaaacatgtttgtgatgtgtgttctcaactaacagagttgaacctttctttttacagagcacttttgaaacactctttttgtagaatctgcgag

SEQ ID NO: 8273 - DNA, 130 bp, Protomyxzoa rheumatica
gagctgagcattccttgcgatgtagcagtttagaaacacactttctacagaatctgcaagtgcatatttggacctctgtgaggaattcgttggaaacaggataatttcagctgactaaacagaagcagtc

SEQ ID NO: 8274 - DNA, 148 bp, Protomyxzoa rheumatica
aataatcaaatgtataaactgaggaataaaacataaccatgaaagctacttataactgcatatggaaaatacagaggataattttttaagtaacatattttgaaagccttaactactaatttgaagagttggcatttgaaaggccagt

SEQ ID NO: 8275 - DNA, 219 bp, Protomyxzoa rheumatica
ttgatgtactttcatattctatgtacagtatataatacatgctttgggtactttgattttttttgtacagtatagaatatataccttgggtactttgatattttatgtagagtaaataatatatggtttgtgaactttgatatttcatgtcgagtataaaatatatatttggggtacaatgatattttatgtacagtatataatctatatttgatgtac

SEQ ID NO: 8276 - DNA, 156 bp, Protomyxzoa rheumatica
ttgcagactttacagacagagtctttccaaactgctctatgaagagaaaagtgaaagtctgtgaactgaacgcacagataacaaagcagtttctgagaatgatctgtgtagtttttacacgaagatatttccatttcaaagattagcctcaaatcg

SEQ ID NO: 8277 - DNA, 158 bp, Protomyxzoa rheumatica
ttatgtacagtatataatacacactttgggtactttgatattttatatacagaatataatacatactttgggtactttcatattttatgtacagtatataatgcatagtttggttactttgatattttatctacagcttataatacatactttggata

SEQ ID NO: 8278 - DNA, 150 bp, Protomyxzoa rheumatica
tatgtgcattcaactcccagagtttaacctttcttttcatagatgactttggaaacagtcagtttgtaaattctgcaactggatatttggacctcttggaggctttcgttggaaacgggatttcttcacataatgctagacagaagaatt

SEQ ID NO: 8279 - DNA, 123 bp, Protomyxzoa rheumatica
ttccgtttcagagagcagctttgaagcactctttttgtagaatgtgcaagtggacatttggagcgccctgaggcctacggggaaaaagcagatatcttcccataaccactagacagaaacatt

SEQ ID NO: 8280 - DNA, 155 bp, Protomyxzoa rheumatica
tattatatactgtacataaaatatgaaagtaaccaaacatatataataaactgtacataaaatatcaaagtactcgaactacatattatatacagtatataaaaagtcaaagtacccaaactctatattatatactgtacataatatatcaaagt

SEQ ID NO: 8281 - DNA, 449 bp, Protomyxzoa rheumatica
aaaagagtgtttcaaacctgctctgtgaaagggaatgttccattctgtgacttgaatgcaaacatcacaaagaaattgctgagaatgctgctgtctgctttttataccttatcccgtttccaacgaaatcctcaaatccagccaaatatccacttgcagactccacaaaaagagtgtttcaaaactatactctccaaagaaatgttcaactctgttagttgaggacacacatcagagactagcttctgagaatgcttctgtccagttgttacgggaagatatttcctttttcaacataggcctgaaaccgcttcaaatgtccgcttccagatacggcaaagagagtgtttcaaaccttctctacgaaagggcatgttctcctcagtcacgtccatgcaaacatcccaaagaagtttctgagaatgcttctgtctggattttatctgaag

SEQ ID NO: 8282 - DNA, 81 bp, Protomyxzoa rheumatica
tttctgagaatgcttctgtctagttgttatgggaagatatatcctttttcaacacaagcctgaatgcgctccgaatggaca

SEQ ID NO: 8283 - DNA, 86 bp, Protomyxzoa rheumatica
aagttcacaaaccatatattatatactgtacataaaatatcacaatacccaaggtatatattctatactgtacaaaaaatatcaaa

SEQ ID NO: 8284 - DNA, 274 bp, Protomyxzoa rheumatica
ccaaagtatgtattatatacggtacataaaatatcaaagtgtcctttgtatgtattttatactgtacataaaatatgaaagcacccaaacatatatgaaaaactgtacataaaatatcaaagtactcaaactatatactgtacataaaatatctaagtaccaaaactatttattttatacccgacataaaatatcaaagtacccaaactatatatagtatactgtacatcaaatatcgaagtacccaaagtatgtattatatactgtacataaa

SEQ ID NO: 8285 - DNA, 127 bp, Protomyxzoa rheumatica
actttgatattttatgtacagaataaaatatatattttatgtaccttcatattttatgtgcagtgtataatacacactttgggtaccttgatattttatgtacagtatgctatatattcgggtactt

SEQ ID NO: 8286 - DNA, 116 bp, Protomyxzoa rheumatica
caaagtacccaaagtgtatattatatactgtacataaaatatgaaagttcatcaaatatattttatattctgcacaataatatatcaaagtacatcaaatatatattatatactgt

SEQ ID NO: 8287 - DNA, 159 bp, Protomyxzoa rheumatica
aatacatactttgggtactttgatattttatgtacagtatgtaatacacgctttgggtactttgatattttatgtagagtatgtaaaacatactttgggtagtttgttattttatgatcagtatataatacatattttgggtactttgatattttatgt

SEQ ID NO: 8288 - DNA, 129 bp, Protomyxzoa rheumatica
ggtactgtaactttagtctaggctctggctacacggcattttgacatatcactgcactgatcaaccaggtgatataactcttgtatagtctctgcctacagggggattgtgacctacctctgcactgat

SEQ ID NO: 8289 - DNA, 136 bp, Protomyxzoa rheumatica
tcatattacaccaaatatatattatatactgtacataaaatatgaaggtacatcaaatgtatattatatgctgcacataaaatatcaaagtccccaaagtttgtattatatactgtacataaaatatcaaagtatc

SEQ ID NO: 8290 - DNA, 148 bp, Protomyxzoa rheumatica
atgtattatatactgtacataaaatatcaaagtacccaaaaggtgtattatatactgttcataaaatatcaaactccccaaagtatgttttacctactgtacataaaatatcaaactccccaaagtatgttttacatactgtacataa

SEQ ID NO: 8291 - DNA, 185 bp, Protomyxzoa rheumatica
tgagttgaacacacacaacacaaagtagtttctgtgaatgattctgtctagtttatatacgaagatgtttcctgttctacctttggtctcaaagccattgaaatctccacatggaaactccacaaaaagagggtttcaaatctgttctttctgaaggaaggttcaactctgtgagttgaatacac

SEQ ID NO: 8292 - DNA, 165 bp, Protomyxzoa rheumatica
tttttcaccgtaggcctcagagcgctccaaacatccacttgcacatactacaaaaagagtgcctcaaagctgctctctgaatcggaatgttcaactctatgagttgaatgcaaacatcacaacgacgtttctgagaatgcttctgtctagatttgatatgaagat

SEQ ID NO: 8293 - DNA, 128 bp, Protomyxzoa rheumatica
aagagttatatcacctggttgatcagtgcagtgatatgtcgcaatgccgtgtagccagagtctagactaatgttacagcacctgggacatcagtgctgagatatgtcacaatgtcccctgtaggcaaa

SEQ ID NO: 8294 - DNA, 163 bp, Protomyxzoa rheumatica
atatattttgggtattttgatattttatgtacagtatataatatatattttcggtcctttgatattttatgtacagtacataatacatattttgtgtactttcatattttatgtacagcacataatatatatttggggtattttatattttatgtacagtata

SEQ ID NO: 8295 - DNA, 124 bp, Protomyxzoa rheumatica
cttgggtactttgatattttatgtacagtatataatatatagtgtatgaactttgatatttcctgtagagtatataatatatacttggggtactttgatattttatgtacagtatataatctat

SEQ ID NO: 8296 - DNA, 129 bp, Protomyxzoa rheumatica
tggaatggaatagaatggaatagaatggaatggtgaaattaaatgtgagctgagattgtgccactgcactccagcctcggtgacacagtgagatcctgtcgaaagaaaatattggaatggaatggagtg

SEQ ID NO: 8297 - DNA, 157 bp, Protomyxzoa rheumatica
cgttttcaggcctaaggtgagaaaggaaatgtcttcaaataagaactggacagaagcattctcagaaacttatttgtgatgtgtgtcctcaactaacagagatgaacctttgttttgatacagcagtttggaaacactctttttgtagaatctacaa

SEQ ID NO: 8298 - DNA, 253 bp, Protomyxzoa rheumatica
catatttttggtactttgatattttatgaacagtatataatatatatttcatgtactttgatatattatgtacagaataaaaaatatatttgatgaacctacatattttatgtacagtagataatatataatttgtgtactttgatattttatgtacagtatataatgcataccttgggtagtttgatattttatgtgcagcatgtaatatgaatttgaagtaccttcatattttatatacagtatacaatat

SEQ ID NO: 8299 - DNA, 89 bp, Protomyxzoa rheumatica
ttgatattttatctacagcttataatacatactttggatagtttgatactttatgtacagtatataatacatactttgggtacttcgat

SEQ ID NO: 8300 - DNA, 203 bp, Protomyxzoa rheumatica
aaacatcccaaagaagtttctgagaatgcttctgtctagatttgagctgaagacaatcccgtttccaacgaaatcctcaaagctaggcaaatatactctagcagattccagaaaaagagtgtttcacaactgctccttcaaaacggtggttcaattctcttacttgagtacacacatctcaaataagtttctgagaatgcttc

SEQ ID NO: 8301 - DNA, 140 bp, Protomyxzoa rheumatica
agggaatcttcaactctatgagttgaatgcagacatcagaaagaaatttctgagaatgctgctgtctaccttttatttgaattcccccttccaacgaaaacctccaagctatccaaatatccacttgcagattccacaaa

SEQ ID NO: 8302 - DNA, 218 bp, Protomyxzoa rheumatica
tcaaagtacccaaagtatgtattacatactgtacataaaatatcaaagtaaccaaagtatgtattacatactttacataaaatatcaaagtacgcaaagtgtgtattatatactctacattaaatatcaaagtacccaaactatgtattatatactgtacataaaatatcaaagttcccaaactatatattatatactgtacataaaatatcaaatta

SEQ ID NO: 8303 - DNA, 88 bp, Protomyxzoa rheumatica
actgtacataaaatatcaaagtacccaaagtatgtattatgtagtgtgcataaaatatcaaagtacccaaagtatgtattatatactg

SEQ ID NO: 8304 - DNA, 139 bp, Protomyxzoa rheumatica
tgcattccactcgggttgattccattcccttctttccactccatttcattcccttccattccactcggaatgattgattccattccattccattccgtttcattccattgcaatccattccaatccattccattccatt

SEQ ID NO: 8305 - DNA, 268 bp, Protomyxzoa rheumatica
aattcatacaaattgcagactgcagcgttctgagaaacatatttgtgatgtttgtattcaggacacagagatgaacattccctatcatagagcagattggaatcactccttttgtagtatctggaaatggacatttggagcgctttcaggcctattttgaaaaaggaaatatcttcccgtaacaactatgcagaagcattctcagaaacttgtttgtaatgtgtgccctctactgacagagttgaacctttctttgcaaagagcagtt

SEQ ID NO: 8306 - DNA, 85 bp, Protomyxzoa rheumatica
tttgatattttttgtacagtatagaatatataccttgggtcctttatattttatgtacagtatataatatatggtttgtgaactt

SEQ ID NO: 8307 - DNA, 96 bp, Protomyxzoa rheumatica
gtacagtttattataaatgtttggttactttcatattttatgcacagtaattaatacatattttgggtactttgatattttatgtaccgtatataa

SEQ ID NO: 8308 - DNA, 150 bp, Protomyxzoa rheumatica
tatgtgcattcaactcacagagtttaacctttcttttcatagatgagtttggaaacagtcagtttgtaaatgctgcaactggatatttgggcctctttgaggctttcgtgggaaacgggatttcttcacataatgctagacagaagaatt

SEQ ID NO: 8309 - DNA, 157 bp, Protomyxzoa rheumatica
cagaaacttgtttgtgatgtgtgtattcaactgagttgaacttttgtttctacagagcagttttaaaacactctttttgtggaatcagaaagtggatattcggatagctctgaggatttcgttggaagcgggattacatataaaatctagagagaag

SEQ ID NO: 8310 - DNA, 139 bp, Protomyxzoa rheumatica
tccattctattccactctgggtgactcaattccattatattctattccattccattccaatccattccaatcgattccattccacacaggctgattcagttccgttctattccattgcattccatttacctccattgca

SEQ ID NO: 8311 - DNA, 196 bp, Protomyxzoa rheumatica
tatgtacagtatataatatatatttgggcaactttaatatattatgtacactatataatatatatttggtgtaatttgatattttatgtacagaatacaatatatattttatgtaccttcatattttatatgcagtgtataatacacactttgggtactttgatattttatgtacagtacataatatatagtttgg

SEQ ID NO: 8312 - DNA, 171 bp, Protomyxzoa rheumatica
tactttttatacgtaatcccgtttccaacgaaatcctccaagctatgcaaatatccacttgcagattccacagaaagagtgtttcaaaactgctctgtcaatagaaaggttcaactctgttagctgcgtgaatatatcccaaagaagattctgagattgcttctgtctagt

SEQ ID NO: 8313 - DNA, 130 bp, Protomyxzoa rheumatica
attgtgaaatatctctgcactgataaactaggtggtgtaaccgttgtccaagctctgcctacaggggcgtttccacatatccctgaactgatgacagtggtgatgtaactcttgcctaggctttgcctac

SEQ ID NO: 8314 - DNA, 135 bp, Protomyxzoa rheumatica
cataaaaactagacagaagcattctcagaaacttgttcttgatgtgtcccttctactgacagagttgaacctttctttgcaaagagcagctttgaaacactccttttgtagaatctgcaagaggatatttggata

SEQ ID NO: 8315 - DNA, 153 bp, Protomyxzoa rheumatica
acagcagcagagttctggaatcctacgtgaaagacaaatattcagaccctcgtagcaatgttctggaatcctatgtgagggaaaaactttcagaccacagcagccatgttctggagtcctatatgacggacattcagaccctcatagcagtgt

SEQ ID NO: 8316 - DNA, 144 bp, Protomyxzoa rheumatica
tattttctacgctttgcctacagggggctttgtgacatacgtttgcactgattaccctggtgatgtaactcatctaagttctgcctacaggagatttgtgacataactctgcactgatcacttatatgatgtaacagttttata

SEQ ID NO: 8317 - DNA, 337 bp, Protomyxzoa rheumatica
ataaaatatcaaagtacccaatgtatgtattatatactgtacataaaataaaagtacccaaggtatgtattatatactgtacataaaatatgaaagtacccaaacatttataataaggtgtacataaaatatcaaagtactcaaactatattctgtacaataaatatcaattacgaaaactatatattttatactggacataaaacatcaaggtactcaaactatatattgtatactgtacataaaataacaaagtacccaaattatgtattatatactgtacataaagtatcaaagtatccaaagtatgtattataagctgtagataaaatatcaa

SEQ ID NO: 8318 - DNA, 142 bp, Protomyxzoa rheumatica
tgatggctgtggtgaaaaaggaaatatcttcacataaaaaccagaggaagcattctcagaaaattctttgtgatgtgtgtactcaactcacagtgttgaaactttctgtcgatagagcagatttgaaacactctttttgtag

SEQ ID NO: 8319 - DNA, 155 bp, Protomyxzoa rheumatica
catttgattccattccatgattccattctactgcattcaataatgattctcttcgagtaaattagatgattccattcgattccatttgatgattattctattcgtgcccattagatgattccacacaattccattcgatgatgattctattcgag

SEQ ID NO: 8320 - DNA, 192 bp, Protomyxzoa rheumatica
aaatcccgtttccaaagatggcctcagaaaagtccagatatacactttcagattctacaaaaagagtttttcaaaactgctaaatcaaaagaaaggtcaaactctgtgagttgaaggcacacatcacacagtagtttctgaggatcattctgtccagtttttctaggaagatatcgccttctccaccatagg

SEQ ID NO: 8321 - DNA, 148 bp, Protomyxzoa rheumatica
tggaaaccctcttttttagaatctgccagcggatatttggagcgttttgcagcctatggtggaaaaggaaatatcttcacatgaaaactaaatagatgtattctgagaaacttctatgtgatgtgtgcgttcatctcacagagttgaa

SEQ ID NO: 8322 - DNA, 129 bp, Protomyxzoa rheumatica
ttctacaaaaagagtgtttccaaactgctgtatcaaaagaaaggttaaactctgtaagctgaatgctcacatcgcaaagtagcttctgataaggattctgtgtagtttttctatgaagatatatccttt

SEQ ID NO: 8323 - DNA, 141 bp, Protomyxzoa rheumatica
ctcacagagttgaaccttcattttgaaagggcagttttgaaatactctttttgaagaatttccaagtggatatttagagcgatttgaggcctgtggtaaaaaagcgaatgtcttcttagaaaaactagagagaatcattct

SEQ ID NO: 8324 - DNA, 180 bp, Protomyxzoa rheumatica
ttttgaaacaacctttttcttgaagatgcaagtgtacatttagagcacttttgggtctacggtagaaaaggaaatatcttcacaaaaaactagacagaagcattgtcagaaactactttgtcatatttgcattcaacccacagtgttgaacattactcttgatagagcagttttgaaaca

SEQ ID NO: 8325 - DNA, 178 bp, Protomyxzoa rheumatica
agaagaattctgagaaacgtctttgtgatctgtgcgttcaaatcacagagttgaaattttcttttgattgagtagtttggaaacactatatttttagaatctgaaagtggacatttggagcactttgcagcctatgttagaaaaggaaatatcttcgcataaaatctagacagaagca

SEQ ID NO: 8326 - DNA, 151 bp, Protomyxzoa rheumatica
acacacacacacacacacacacacagtccctgaactcgctgcatgctgggattgtagtcctgcagccctgtgaccaaagggccaagagtgtttatgagactacatctcccagaaaacgtagggagaggcacacagccccacatcttttccc

SEQ ID NO: 8327 - DNA, 140 bp, Protomyxzoa rheumatica
ttaagtgatgatatttcctttttcaccataggcatcaaagagttcccaaatatccctttgcagattctacaagaagactgtttccaaactcctcaaacaaaagaaaggttcaacatagtgagttgaatgcacacatcata

SEQ ID NO: 8328 - DNA, 81 bp, Protomyxzoa rheumatica
tcctgtggcagtgttttagaattcgatgtgaaggacaaacaatcaaaacccagaggcagtgttcttggatcttatgtgaag

SEQ ID NO: 8329 - DNA, 165 bp, Protomyxzoa rheumatica
tcatcataggccacaaaccgctcagaaaaacccctttgcagattctacaaaaagaatgtttccaaacttctgaaggaaaagcaaggtttaactttgaaagcggaatgcacacatcacaaagaagtttctcagaaaacttctatatagtttttatgtgaagatatt

SEQ ID NO: 8330 - DNA, 175 bp, Protomyxzoa rheumatica
actcacagagtttaacctatcttttgactgagaagttttgaatctctctttttgcagtatctgcaagtggaaaattggagtgctttcaggactaacatggaaaagcaaatatcttcatataaaaactacacagaagcacttcagatgggaggagccaagatggccgaatatgaac

SEQ ID NO: 8331 - DNA, 176 bp, Protomyxzoa rheumatica
tttaatttgaagaaattaccctttccacaataggcctcaaatcgctctaaatatccccatacagtttctacaaaaagagtgtttgaaaactgctcaatccaaagaaaggttcaactctgtaagatgaatgcacacatcacaaagtagtttcacagaatccttctgcatagttttta

SEQ ID NO: 8332 - DNA, 145 bp, Protomyxzoa rheumatica
ctactctacagaaaggaatattcaattctgtgagttaaagacacacatcacaaagaagcttctgagaattcttctatctagttttctatgaagaaatcccgtttccaacgaaagcctcaaggaggtacaaatatccacttgaaga

SEQ ID NO: 8333 - DNA, 156 bp, Protomyxzoa rheumatica
tcaaagtagaccaaatatatattatgtactgaaaaaaaaacatcaaagtacataaaacgtatattatatactgtacataaaatatcaaagtacatcaagtgtatatttacactgtagataatgtatcaaagtacccaaattatatattaaatactg

SEQ ID NO: 8334 - DNA, 183 bp, Protomyxzoa rheumatica
ttaatattttttcccaatttatagaatatattgagaataaattttagccatgcacatctattacaaacttcacgatatactttgctatttttatatttcttatactcttataaaatgtgtgttctggactcacgttggcttccatttcttccctctggcttctattagtttaggctatgagca

SEQ ID NO: 8335 - DNA, 186 bp, Protomyxzoa rheumatica
tcctttttcatcatgggcctcaatgcactcagaaatatccctttgcagattctacaaaaacaatgcttccaaactgctgaaagaaaagaaaggtttaaaactgtgagatgaatgcacacatcacaaagcagtttctcagaaagcttcctgctaatttttgtcagacgtttcctttttcaccatagg

SEQ ID NO: 8336 - DNA, 159 bp, Protomyxzoa rheumatica
atcttcaagtggacatttggagtgctttgagtcctatggtgtaaaagcaaatatcttcacatagaaactagacagaagaattctgagaaacttctttgtgatgaatgcgttcatttcagagagttgaacctttagtttgattgagcagttttgaaactc

SEQ ID NO: 8337 - DNA, 185 bp, Protomyxzoa rheumatica
cgttggaaacgggttatcttcatataaaatccagacaggagcattcacagaaacttctttgtgctgtatgtcctcaattcactgagctgaacctttgtttggatacagcattttggaaacattccttttgtagaatctgcaagttgatatttggatagctttgaggatttcgttggaaacgggaa

SEQ ID NO: 8338 - DNA, 140 bp, Protomyxzoa rheumatica
ctactttttttgagaagttattcccatttccaacgaacaattcaaagtactccaactatccccttgcagattctacaaaaagattgtttcaaaactgctctgcggaaagaaagttcaactctgtgatttgaattcacaca

SEQ ID NO: 8339 - DNA, 148 bp, Protomyxzoa rheumatica
cactccattccattccactcgattccattacactcctttctattgcactccattcaactccattccattccatgccaatccattccattccattacactccaatcccttccactccatgccaccacattccatgtcattccactccaa

SEQ ID NO: 8340 - DNA, 149 bp, Protomyxzoa rheumatica
caaactagacagaagcattctcagaaactgctttgtgatgagtcgattcacctcacagagtggaaccgttcttttgatagagcagttttgaaactgtttttttttttatctgtagtgttcatttcgaaatctttgaagcctgttgtgga

SEQ ID NO: 8341 - DNA, 155 bp, Protomyxzoa rheumatica
aagggaattgaatggaatggactggaatggaatgtactggaagagaacggactcgaatgtaatggactgcaatgtaattgattagaattgaatgtaatcaaaagtaatgtaatctaatggaatggaatgcaatgcaatgaaatgaaatcgaatgg

SEQ ID NO: 8342 - DNA, 84 bp, Protomyxzoa rheumatica
ataccattcctttccgatccattcaatcgtagttctttccgttcgattgtattccatttgattccattccatttgattaccttc

SEQ ID NO: 8343 - DNA, 141 bp, Protomyxzoa rheumatica
ggaatcaacatccaatgggatcaaaacgaatcagggaatggaaagaatggaatcatcatcaaatggaatcgaatggaaacatcaaatggaatctaatagaaccatcatcaaattgaatagaatggaatcatcatcgaatgg

SEQ ID NO: 8344 - DNA, 147 bp, Protomyxzoa rheumatica
attcctttctattccattcaattgcattccattacattccatttgattacattactttcgattccattccatttgaatcaaatacattggaatccattacattcgagtcctttctattccagtgtcctttctattccagtgcattcc

SEQ ID NO: 8345 - DNA, 166 bp, Protomyxzoa rheumatica
tatagacagagctgaaacaagacttccatcacctgggtgatcattgcagacatatatcacaaatccccctccaggcagagtatagagaagagtcccatcacctgggtgaacagtgcagagacagttcacaatgaccctgtaggcagagagtggacaagagttacat

SEQ ID NO: 8346 - DNA, 160 bp, Protomyxzoa rheumatica
tcaactcacagatttgaacctttcttttcatagagcagttttgaaacactctcgtcgtagaatctgcaattgaatatttggactgctttgaggccttcgttggaaaagggaatatcttgacataaaaagtaaacagaagcattcccagaaacttctctgt

SEQ ID NO: 8347 - DNA, 153 bp, Protomyxzoa rheumatica
cagaatgcctctgtgttttttatgtgatgatatttgtttttccacagtagggctcaaagggctccaaatatccacttgcagattctacaaatactgtgtttagaaactgctcaatctaaagaaaggttcaactctgtcaaatgaatgcacaca

SEQ ID NO: 8348 - DNA, 173 bp, Protomyxzoa rheumatica
tctttccgctgatcactcaggagatggaagtcttgtctaggctctgtctatgggggcattgtgtcaaatatctgcactgatctcccagttgatgtacctcttttctagtctctgtctacagggatttttgtgacatatcactgcactgatcacctaggtgatgtaagtcttgt

SEQ ID NO: 8349 - DNA, 146 bp, Protomyxzoa rheumatica
gtggaaaaggaaatatctccaaatagaaactacacagaaacattcagagaaccttctttctgatgagtgcattcatcatagggttgaacctttgttttgatttagcagttttgagacaatccgtagaatctggatgtgaatatttg

SEQ ID NO: 8350 - DNA, 206 bp, Protomyxzoa rheumatica
tagagtccattcaatcatgattccattcgagtccatatgatgattgcattcgattccattcgatgttgattccattcgagtcaattcgatgattccatttgattccattcgatgatgattccattcgagtccattccatgattccatttgattgcattcgatgtttccattcaagtctgttcgttgattccactcaattccattcg

SEQ ID NO: 8351 - DNA, 146 bp, Protomyxzoa rheumatica
tacagcgaattcctgaaagaactccaaatattcaaaagcagattctacaaaagcagtgcttcaaaactgctctatcaaaagaaagtttcaactctgtgaattgaaagcacacaccacaaaggagtttctgagaatgcttctctcta

SEQ ID NO: 8352 - DNA, 138 bp, Protomyxzoa rheumatica
gagttgaatggaatggggtgtaattgaattgaatggagtgtagtggagtgaactggagttcaatggaatggaatgggcaggcatggaattgaaaggcttggagtggagtggaattgagaggagtggaatggagtaggg

SEQ ID NO: 8353 - DNA, 144 bp, Protomyxzoa rheumatica
aaaactagaaagaatctttctgagaaagttctttgtgatatgtggattcctctaagagttgaaccattcttttgattgagcagtttggatccactgtttttctgggatctgcaaagcaatattttgagcgctttgaggcctttg

SEQ ID NO: 8354 - DNA, 140 bp, Protomyxzoa rheumatica
aatggtggaaaaggaaacatcttcacataaaatctaggcagaaacatcctcagaaacttctttgtgatgtatgcattcaactcgcggagttgaaccttccttttgagagagcatttttgaaacattctttttgtagaatc

SEQ ID NO: 8355 - DNA, 193 bp, Protomyxzoa rheumatica
atggaatggaatgtaatagaatggaatggaatcaactcgaatggaatggaatggaatgcaataaaatggaatggaatcaagtcaagtggaatggaatggaatggaatggaatagaatggaatgcaatagaatggagtacaatagaatggaatttaatcaactcgagtggagtggaatggaatggaatggaatg

SEQ ID NO: 8356 - DNA, 140 bp, Protomyxzoa rheumatica
tgtgaagatatttccttttctatcacagaccttaaagggctccaaatgtccagttacagattctacaaaaagactgtttcaaaactgctctatccaaagaaatattcgactctgtgagttgaatgcacagttcacaaaga

SEQ ID NO: 8357 - DNA, 143 bp, Protomyxzoa rheumatica
aacacaattcaacatttttacatatttagacacagtgtaattggttagcttattggaaaaagttaaatgactaccagtttatatggcatatttattctgaattaattgctaatctagatttgagagatgaaataattattttt

SEQ ID NO: 8358 - DNA, 150 bp, Protomyxzoa rheumatica
attccactccgttccactccactccacttcaccacattccagtctaatcctttctatgcctttcgattccattccattcgattccattccattccatacgattctaatcaattccattatattccattccattccattcccctgcactcg

SEQ ID NO: 8359 - DNA, 163 bp, Protomyxzoa rheumatica
atgtgaagatatcccgtttacaacaaattcctcaaagagcccccaatagcaacaagcagattctacaaaagcagtgtttcaaaactgctctatccaaagcaactttcaactctgcgaattgaacacacacatcacaaagcagtctctgagaatgcttctgtct

SEQ ID NO: 8360 - DNA, 90 bp, Protomyxzoa rheumatica
gctccaaagaaaaggcatatcttgtttactcttctaatcccgtagtattcgaaaactttgtttttccaattctttgagataataaactgg

SEQ ID NO: 8361 - DNA, 216 bp, Protomyxzoa rheumatica
actccattccattctattactttcatttccattcaattccgttgcatttgattccattccacacggtttcattccatttgagtccactccattccattccattccattccattcagttctattccattctgttccattccattccgttccattacattccattccattaggtaccattccatattgttccattcgattccattcgaatccattcca

SEQ ID NO: 8362 - DNA, 156 bp, Protomyxzoa rheumatica
tcaactcacagagttgaacataccttttcatatagcacttttgaaaaactcttttcatagaatctgcaagtggatatttgtactgctttgaggccttcgttggaaacatcaatatctacacataaaaaatagaaagaagctttctcagaaacttct

SEQ ID NO: 8363 - DNA, 81 bp, Protomyxzoa rheumatica
ttaaactctgtgagttgaaggcacacatcagaaactagtttctgcgaatgactctgtgtagttttactacgaagatatttc

SEQ ID NO: 8364 - DNA, 165 bp, Protomyxzoa rheumatica
ttttgattgtgcagcttggaaacactgtttttgtagaatctgcaaatggatatttggagcactatgtggtctattgtggaaaagaaaatatcttcacataaaaacttcaccgaagcattctaagagacttctttgttatgtgtgtattcaactcacagagttgaa

SEQ ID NO: 8365 - DNA, 161 bp, Protomyxzoa rheumatica
aatcggatgtaatggaatatagtggaatggaatggaatggaatggaatggaatcatcatcgaatggactcgaatggaattatcatcgaatggaatcgtcatcaaatggaaacgaatggagtcatcatcgaatggaatcgaaaggaatcatcatcaaataga

SEQ ID NO: 8366 - DNA, 147 bp, Protomyxzoa rheumatica
atataatggactcgtatggaatggactcaaatagaatggattccaaaggaatggtctcgaatggaatttatttgaatagaatttaatcaaatggaatgcaatagtatgtaatggaattgaatggaatggacaggaatggaatggact

SEQ ID NO: 8367 - DNA, 191 bp, Protomyxzoa rheumatica
gaatggactcaaatggaatcatggattggactcaaatagaattatcaaatgggctcaaatggtatcatcgaatggactcgaatggaatcatttttgaatggaatcaaatggaatcatcaaatggaaccaaatggaatcatcgaatggaatcgatcagagtcatcattgaatggaatcaaatggaatcatcg

SEQ ID NO: 8368 - DNA, 122 bp, Protomyxzoa rheumatica
ataatataggttcaactctgtgagatgaattcacacatcaaaatgaagtttctcagaatgattctgtgtagtttctatgtgaagatatttccttgaccaccataagaaaaaaagggctccaa

SEQ ID NO: 8369 - DNA, 132 bp, Protomyxzoa rheumatica
gcattcaacacacggagttgaaccttccttctgagagaacagttttcaaacagtctttttgtagtatctgcaagtcgctatttggaacgctatgaggcctatgagggaaaaggaactatcttcacatacaaa

SEQ ID NO: 8370 - DNA, 135 bp, Protomyxzoa rheumatica
actttgggtactttgatattttatgtacagtatataatgcataatttgggtacttcaatagtttatgcacagtatataatacatactttgggtaatttgatattttatgtacagtatataatgcatactttgggt

SEQ ID NO: 8371 - DNA, 134 bp, Protomyxzoa rheumatica
gagctttccccataaaagagatgtgacatatgtctagaccaagcacctgggtgatgtgactctcctttattgactgagccctgtgtattttgggtattctgacgtatccctggacctaacttctggaagataag

SEQ ID NO: 8372 - DNA, 146 bp, Protomyxzoa rheumatica
tgtagtttttatttgaagatattttcttttccaccatgggtcacaaagggctcctaatacccacttgcagattctacaaaaagagagattcaaaaaggctcaatcaaaagataggctctcccctgtgagttgaatgcacacatcac

SEQ ID NO: 8373 - DNA, 144 bp, Protomyxzoa rheumatica
atgcttctgtctagtttttatttgaagatatttcctttcttaccataggcctgaaagcgcttgaaatgtccgttttcagatactacagaaagagtgtttcaaacatgctctatgaaagggaatgttcagttctgtgacgtgaat

SEQ ID NO: 8374 - DNA, 105 bp, Protomyxzoa rheumatica
tatagggcgaaatagggctccaaatattcacttgcagattctacagaaagagagattccaaactgctcaatcaaaacataggttcaacactgtgagttgaatgca

SEQ ID NO: 8375 - DNA, 140 bp, Protomyxzoa rheumatica
gctttaaactcatagtgttgaacctatcttttcattgagcagtattgaatctctctatttgtagaatctgcaagtggatatatggagccctttgtggtctatggtggaaaaggaaatatcttcaaattaaaagtacacag

SEQ ID NO: 8376 - DNA, 255 bp, Protomyxzoa rheumatica
tcaaaaagaagtttcttagagtgcctctatgtagattttatgtgaagatatttgcttttccactttaggtctcaaagcgctccaaatatccacgtgcagattctaaaaaaagagagattctaagctactccatcaaaagataggttcagctctgtgagttgaattcacacatcacaaagaagtttctaggagtgcttctgtgtagttgttatgtgaagatatttgcttttccacagtaggcctcaaatcgctcta

SEQ ID NO: 8377 - DNA, 142 bp, Protomyxzoa rheumatica
ctccaagtggatatttggagtgttttgaagcctattgtggaaaaggaaataccttcacatgaaaactatacagaagcattctgagaaacttcatcgtgacttgtgcactttactcagatattggaatttttattttgatttc

SEQ ID NO: 8378 - DNA, 160 bp, Protomyxzoa rheumatica
ttttgaaaatctatttttgtagaatctggaagtggatatatggagccctttgcggcctatagtgcaaaaggaaacatcttcacataaaacctacacagaagcgttctgagaaatttcttggtgatgtgtgcattcatctcacagagttgaacatttcttt

SEQ ID NO: 8379 - DNA, 166 bp, Protomyxzoa rheumatica
gtactttgatatttcatgtacagaataaaatatatatttgatgtactttcatatgttatgtacattatataatacatgctttgggtactttggtattttttgtacagtatagaatatataccttgtgtaatttgatattttatgtacagtatataatatatagttt

SEQ ID NO: 8380 - DNA, 149 bp, Protomyxzoa rheumatica
gtttccattccgcttcattccttttgattccattccattccattgtattccattccatcccattccattccactctattccattccattcaattccattccattcaataccattccactcgagaaagtttcattcttgtccattccatt

SEQ ID NO: 8381 - DNA, 185 bp, Protomyxzoa rheumatica
catagtttttatgtgaagatatttccttctccactataggcctcaaaaggctccaaatatccacttgcggattctaaaaaaagagtgtttcaaaactgctgtatcaaaacaaagattcaactctgtgagatgaatgcacagatcgcaaagaagtttctcagaatgcttctgtgtagtttttatgt

SEQ ID NO: 8382 - DNA, 81 bp, Protomyxzoa rheumatica
ccaatacagtgaaacgctgtcactactaaaaatccaaaaaattagctaggcattgtggcagctggtgtagtcccagtgtgg

SEQ ID NO: 8383 - DNA, 136 bp, Protomyxzoa rheumatica
attcaaatcagagagttgaaccttcctttagacagagcggattggaaacactctctttgtggaatttgcaagtggaaaattctagcagtatgaggccaatggtacaaaaggaaatatcttcgtataaaaactagac

SEQ ID NO: 8384 - DNA, 92 bp, Protomyxzoa rheumatica
gccaaaagagactaaagcagacagagtggataaattaatcgtttaaacctcgtaatatgctgcttacaagagactcaattatgaattaagag

SEQ ID NO: 8385 - DNA, 244 bp, Protomyxzoa rheumatica
ttcatattttatgtacagtatataatgtatatatgggcaacttaaatatattatgtacagcatataatatatatttggtgtagtttgatattttatgtacagaatataatgtatctttgatgtaccttcatattttatgtacagtataccatatatattttgggtactttgatattttatgtacagtatgttatatattctgggtactttgatatattatgtacagtatataatatacagtttg

SEQ ID NO: 8386 - DNA, 147 bp, Protomyxzoa rheumatica
gtctagtttgtatgtgaagatatcccgtttacaacgaaatcctcaaagagctccaaatatccacaagcagatcctataaaagcggtgtttcaaaactgctctatcaaaagaaaatttcaattctgtgaatttgacacacacttcaca

SEQ ID NO: 8387 - DNA, 141 bp, Protomyxzoa rheumatica
ttcacaatgcccctgcagcagagcataaggaatagttacatcacctacatgatcagtgcagaaatatgtcacaaggccccctacaggcagagcctggagaagagttacatcatcttggtgatcaatgcagtgatatgtcac

SEQ ID NO: 8388 - DNA, 90 bp, Protomyxzoa rheumatica
cttgcagattttacaaaaaccgtgtttcaaaactgctctaacaaaagaaaggttcaactctgtgagatgaatgcacacatcacaaagaag

SEQ ID NO: 8389 - DNA, 151 bp, Protomyxzoa rheumatica
gaggctttacgacttatcccttcactgatcactaggtgatgtaacacttgtcaaggctctgtctacacgggaattttcacatatctctgccctgatcacctaagtgatgttacccttgtctaggttcaggttactggggatttctgacata

SEQ ID NO: 8390 - DNA, 150 bp, Protomyxzoa rheumatica
tgctcaatcaaaaaataggttgaactctgttagttgaatgtacacatcacaaagaattttctcagaatgctactgtgtagtttttacgtgaagatatttcctttttcaaaacaggcctcaaagccctccaaatatccacttgcagattct

SEQ ID NO: 8391 - DNA, 147 bp, Protomyxzoa rheumatica
ctccaaaaagagtgttttaaaactgctgtaccaaagaaagcttcatgtctgagatatgactgcatacaacacagagaactttctcaaagtgcttctgtttatttttcttatgaagatatttccttttccactatgggccacagagcg

SEQ ID NO: 8392 - DNA, 159 bp, Protomyxzoa rheumatica
cccaaatatatattttatactgtacatgaaatatcaaagttcacaaactataaattatatactgtacataaaatatcaaagtaccgaaggtatatattctatagtgtacaaaaaatatgaaagtacgcaaagcatgtattatatactgtacataaaata

SEQ ID NO: 8393 - DNA, 157 bp, Protomyxzoa rheumatica
ctatactgtacaaaaaatatcaaagtacccaaagcatgtattatatagtgttcataaaatatgaaagtacatcaaatatatattttatactctacataaaatatcaaactacaccaaatatatattctatagtgtacataaaatatcaaagtaccca

SEQ ID NO: 8394 - DNA, 87 bp, Protomyxzoa rheumatica
tctcagaaggaaggttcaactccgtgtgttgaatgcacacatcaaaaagcagtttctgagaatgcttctgtctagtttgtatgtgaa

SEQ ID NO: 8395 - DNA, 149 bp, Protomyxzoa rheumatica
attctcagtaactactttgtgatgtgtgtactcaactcacagagttgaacttttcttttgaaagagaagttttgaaacactctttttgtagaatctgcaaatgggtatttagcctgctttgaggccttcattggaaacgggaatatctt

SEQ ID NO: 8396 - DNA, 166 bp, Protomyxzoa rheumatica
ttctgcctttggcctcaaagcgcttgaaatctccacttgcaaattccacagaaagagtgtttcaaatctgctctgtgtaaacaatcgttcaactgtgtgagttgaatacacacaacacaaggaagattctgagaattcttctgtctagcagaatatgaagaaatcc

SEQ ID NO: 8397 - DNA, 263 bp, Protomyxzoa rheumatica
tctgagaatgcttctgtctagattttacctgaagacaatcccgtttcccactaaatcctcaaagctatgcaaatatcctcttgcagattctacaaaaagagcgtttcaaaacttctctatgaaaagaaaggttctactcatttagtggaggacacacatcacgagtaagtttctgagaatgcttctgtctagtttttatgggaagatacttcctttttcaccttaggccggtaagtgctccaaatgtccacttacacacacta

SEQ ID NO: 8398 - DNA, 209 bp, Protomyxzoa rheumatica
aaatctagacagaagcattctcagaaacttctttgtgctgtacgtcctcaattaacagagttgaacctttgtgtggatacagcattttggaaacattcctttggtagaatctgcaagttgatatttagatagctttgaagatttcgttggaaacaggaatatcttcatagaaaatctagacggaagcattctcagaaactgctttgtga

SEQ ID NO: 8399 - DNA, 85 bp, Protomyxzoa rheumatica
gatggagcagttttgaaacactctttttgtagaatctgcaggtgtatatttggacctctttgtggccttcgtttgaaacgtgatt

SEQ ID NO: 8400 - DNA, 106 bp, Protomyxzoa rheumatica
taggttcaacttggtaatttgaaagcccacatgacaaacaatttctgagaatgtttctgtgtagtttttaagggaagatatttgattttcaaatgtaggcctcaaa

SEQ ID NO: 8401 - DNA, 126 bp, Protomyxzoa rheumatica
agaagcattcagagaaagttctttgtgatgtgtgcattgaacacgcagagttgaaactatcttttgattgtacagttttgaatatctctttttgtagaatctgcaagtggaagtttggagctgttt

SEQ ID NO: 8402 - DNA, 198 bp, Protomyxzoa rheumatica
tcagaaactgctttgtgatatctgcattcacgtcacagagatgaacattccctttcatagagcaggtttgaaacacactttctgtagtatctggatgtgggcacttggagcgcttggacgcttatggtgaaaaaggacatatcgtcccataaaaactggacagaagcattctcacaaactgctttgtgacgtatgtct

SEQ ID NO: 8403 - DNA, 291 bp, Protomyxzoa rheumatica
ctgctctgtcaaaatgaaggttcaactctgttacttgagtacacacatcacaagaaagattctgagaatgcttctgtctggtttttaggagaagatatctcctttttcaccataggcttcaaagcgctgccaatgtccacttccaaatattacaaaaagagtatttcaaaccagctctatgaaaggaagtgttcaactctgtgagttgaatgcaaacatcacagagaagtttctgagaatgcttccgtcttgattttatatgaagatattcccgtttccaacgaaaccttc

SEQ ID NO: 8404 - DNA, 102 bp, Protomyxzoa rheumatica
agaaaccccgtttccaatgaaggcctcaaaaaagtccaaatatttacttgccgattccacagaaagagtgtttcataactggtctatcaaaagaaaggttaa

SEQ ID NO: 8405 - DNA, 85 bp, Protomyxzoa rheumatica
atcaaagtacccaaactatatattatatactgtacataaatcatgaaagtacccaaagtatgtattatatactgtacataaaata

SEQ ID NO: 8406 - DNA, 323 bp, Protomyxzoa rheumatica
cttctttgtgctgtatgtcctcaattaacagagttgaaccattgcttggatacaacattttggaaacattcctttagtagaatctgcaagttgatatttagatagctttgacgatttcgttggaaacgggaatatcttcataaaaaatctagacggaagcattgtcagaaactgctttgtgatgtttgcattcaagtcacagagttaaatattcttttatagagcaggtttgaaacactctttctgcactccctggaagtggagatttcgagcgctttgaggcctatggtgaaaaaggaaatatcttcccataaaaactagac

SEQ ID NO: 8407 - DNA, 240 bp, Protomyxzoa rheumatica
cgagtggaatggaagggaatgtaatggagtggaaagaagggaatggaatccacccgattggaatgcaaggcaatggaatggaatggaaaggaatggaatggaatcaactcaattgcaatggaatggaatggaatggaatggaattgaatggaattaaccggaatagaatggaatgcaatggaatggaacagaatggaatggaatggaaggtaatggaatcaacacgagtgcaggggaatg

SEQ ID NO: 8408 - DNA, 196 bp, Protomyxzoa rheumatica
ctatatactgtacataaaatataaaagtacgaaaactatatattttatacagtatataaaatatcaaagtactcaaactatatattgcatactgtacataaaatatcaaagaacccaaagtatgtattatatactgtagataaaacatcaaagagaccaaagtatgtattatatactgtacataaaatatcaaagt

SEQ ID NO: 8409 - DNA, 168 bp, Protomyxzoa rheumatica
aaacttctttgggatgtttgcattcaagtcacagagtagaagattccctttggtagagcagttttgaaacactctttttttagtatatggaagtggacatttggagcgctttcaggcctacgttggagaaggaaatatcttcccataacaactagacagaagcattct

SEQ ID NO: 8410 - DNA, 131 bp, Protomyxzoa rheumatica
tgtgtgcgttcaactcaaggagtttaagctttcttttcatcgagtagtttggaaacactctgtctgtaaagtctgcaagcagatatttgggcctctttgaggccttcgttggaaacgggatttcttcatgt

SEQ ID NO: 8411 - DNA, 152 bp, Protomyxzoa rheumatica
cagtatataatttatatttgatgtactttcatattttatgtacctattattatatatatttgatgtaatttcatattttatgtactgtatataatgtatagtttgggtaacttgatattttatgtacagtatagaatatatatttggtgtac

SEQ ID NO: 8412 - DNA, 85 bp, Protomyxzoa rheumatica
tttcaacactgctctatcaaaataaggtttcaagtctgtaagtttaatgcacacatcacaaagcagtttctgagaatgcttctgt

SEQ ID NO: 8413 - DNA, 142 bp, Protomyxzoa rheumatica
tacatcaaatatagattatatactgtacataaaatatcaatgaaccccaaatatatattttatactatacatgaaatatcaaagttcacaaaccatattttgtatactgtacataaaatatcaaagtacccaaggtatatat

SEQ ID NO: 8414 - DNA, 144 bp, Protomyxzoa rheumatica
aaaggttctactccgtcagttgaggacacacatcacgagtaagtttctgacaatgcttctgtctagtttttatgggaagatatgtcctttttcaccttaggctggaaagcgctccaaatgtccacttacacacactacaaaaag

SEQ ID NO: 8415 - DNA, 174 bp, Protomyxzoa rheumatica
tacatactttgggcactttgatgttttatgtacagtatataatacatactttgggtcctttgatattttatgtacagaatataatacataatttgggtacttttatattttatgtacattatataatacatagtttgggtaccttgatattttatgtacagtatataatacata

SEQ ID NO: 8416 - DNA, 82 bp, Protomyxzoa rheumatica
ttatgtacagtatataatacacactttgggtactttgataatttatgtacagtatataatacacactttgggtactttgata

SEQ ID NO: 8417 - DNA, 89 bp, Protomyxzoa rheumatica
ctttccattccactcgaatacattccctcctattccactcggaacgatgccattccattccattccattccattccattccattccctt

SEQ ID NO: 8418 - DNA, 147 bp, Protomyxzoa rheumatica
ccacaaaaagagtgtttccaatctactctgtctaaaggaacgttcaactccgtgagttgaatacacacacacagaaagaattcactgagaattcttctgtctggcagtacatgaagaaatcccgtttccaacgaaggcctcaaagag

SEQ ID NO: 8419 - DNA, 147 bp, Protomyxzoa rheumatica
aaaatatcaaaatacccaaggtatatattctatactgtacaaaaaatatccaagtacccaaagcatgtattatatactgtacataaaatatgaaagtacatcaaatctatattttattctgtacataaaatatcaaagtacaccaga

SEQ ID NO: 8420 - DNA, 136 bp, Protomyxzoa rheumatica
tccctttgattccataacatttgcgtccattcaattccattcctttcgttatcattccatttgatgccattccattcaattctgttctactccaccccaatacattcaattccattccatccgattccattacatt

SEQ ID NO: 8421 - DNA, 140 bp, Protomyxzoa rheumatica
tactttgatatattatgtacagtatataatatacagtttgtgtactttgacattttatatactgtatataatatgtagattgagtactttgatattttaagtacagtttattataaatgtttggttactttcatatttta

SEQ ID NO: 8422 - DNA, 130 bp, Protomyxzoa rheumatica
actttgatattttatgtacagtatataatatacatttggtgtactttgatatttcatgtacagaatataatatatatttgatgtgccttcatattttatgtacagtatataatatatagtttgggtattt

SEQ ID NO: 8423 - DNA, 107 bp, Protomyxzoa rheumatica
gattatatactgtacataaaatatcaaagtaccccaaataaatattatatactctacatgaaatatcaaagttcacaaaccatatattatatactgtacataaaata

SEQ ID NO: 8424 - DNA, 94 bp, Protomyxzoa rheumatica
tttatgtacagtatataatatatagtttgggtactttgatatattatgtacgggatataatacatactttgggtactttgatattttatgtaca

SEQ ID NO: 8425 - DNA, 91 bp, Protomyxzoa rheumatica
tttgggtactttgatattttatgtacagtatataatacatgctttgagtactttgatattttatgtacagtatataatgcatactttgggt

SEQ ID NO: 8426 - DNA, 87 bp, Protomyxzoa rheumatica
atgtgtgcattcaactcacagagttgaaactttcttttgagaaagcagttttgaaacagtctttttgtagtatctgcaagtggatat

SEQ ID NO: 8427 - DNA, 97 bp, Protomyxzoa rheumatica
tctattagtttccattccattccattcccttccattccactctggtttattccattcctttccattccactcgaatacattccctcctattccactc

SEQ ID NO: 8428 - DNA, 81 bp, Protomyxzoa rheumatica
gtatgtattatatactgtacataaaatatcaaagtacccagagtatgtattatatactgtacataaaatatcaaagtaccc

SEQ ID NO: 8429 - DNA, 81 bp, Protomyxzoa rheumatica
ctcagaatgcttctgtgtggtttttacgtgaagatatttgtttttccacagtaggccccaaagcgctccaaatatccactt

SEQ ID NO: 8430 - DNA, 81 bp, Protomyxzoa rheumatica
tatttgtgagcccattgatgcctctggggaaacaggaaatctcttcacataaaaacgagacagaatctttctcagaaacgt

SEQ ID NO: 8431 - DNA, 81 bp, Protomyxzoa rheumatica
gaaacattctgagaagcttctttgtgatgtgtgcgtccatatcgaagagttgaacctttcttttgattgagcatttttgaa

SEQ ID NO: 8432 - DNA, 126 bp, Protomyxzoa rheumatica
tctgtgtagttttaaagtgaagatatttccttttacaccataggccgcaaatggctccaaatatccacttgcaggttctacaaaatagagtttcaaaacttcttaatcaaacgataggttcaactc

SEQ ID NO: 8433 - DNA, 81 bp, Protomyxzoa rheumatica
cctgttttggaaaaggaaatatcttcaaattaaaaccacagagaagcattctgagaaacttctttgtgatgtgtgcattca

SEQ ID NO: 8434 - DNA, 121 bp, Protomyxzoa rheumatica
atgtgtgaattcatgtcacagaattcaacctttctttcaggtgagcagtttggaaacagtctttggtagaagctgcagagagaaatttcttagctgcttgaggcctatggtgaaaaagaaa

SEQ ID NO: 8435 - DNA, 90 bp, Protomyxzoa rheumatica
attgttgaaggtatctgttgattgagcagtttagaatctctctttttgtagaatctgcaagtggatatttggagccccttgcaacctatg

SEQ ID NO: 8436 - DNA, 167 bp, Protomyxzoa rheumatica
gtaggcagttcctagtcaagagttgaatcacctgggtgttcagtgctgagatatttcacaatccccctgtaggcagagcctatacaagagttatatcacctggttgatcagtacagtgatatgtcacaatgccgtgtagccagagcctagactaaagttacagtacc

SEQ ID NO: 8437 - DNA, 100 bp, Protomyxzoa rheumatica
ctgtacataaaatatcaaagtacccaaagtatgtattatacactgtatataaaatatcagagtacccaaagtatgtattatatactgtacataaaatatc

SEQ ID NO: 8438 - DNA, 249 bp, Protomyxzoa rheumatica
cattccattcaagtccattccacggcattccattccattcgatatattttgataacaccccattccattctgctccttacaattcaattcaattccagtccatttgattccattccatttgattacattccattcgactccattccattcgtctctattccattcgagtccattccattccattgcattccgttcgaatccctattccattgcattttgttccagtccattccatttgagtccattcca

SEQ ID NO: 8439 - DNA, 107 bp, Protomyxzoa rheumatica
gatattttatgtaccgtatataatacatactttgggtactctgatattttatgtacagtgtatgatgcatactttgggtactttgatattttatgtacagtatataa

SEQ ID NO: 8440 - DNA, 144 bp, Protomyxzoa rheumatica
tgtttgtcatgtgtgctttcaaattaccaagttgaacctaccttgtgattgagcagttttgaatctctctttttgtggaatctgcaagtggatatttttagccatttgcggactgtggtggaaaaggaattatcttcaaatcca

SEQ ID NO: 8441 - DNA, 89 bp, Protomyxzoa rheumatica
attccattgcattccgttccattacattcccctgcactcgggttgattaaattccattccattccattccattccattccattccattc

SEQ ID NO: 8442 - DNA, 83 bp, Protomyxzoa rheumatica
agaatgcttctgtctagttgttatgggaagatatttcctttttcaacacaagcctgaatgcgctccaaatggacacttccaga

SEQ ID NO: 8443 - DNA, 156 bp, Protomyxzoa rheumatica
acagtatagaatatataccttgtgtactttgatattttatgtacagtataaaatatatagtttgagaactttgatatttcatgtacagtataaaatatatatttcggggactttggtattttatgtacagtatataatctatatttgatgtacttt

SEQ ID NO: 8444 - DNA, 146 bp, Protomyxzoa rheumatica
aaagcgctccaaatgtccacttccagatactacaaaaggagtgatttcaacctgctctatgatagggaatgttcaactctctgtcctgaatacaaacaccacaaagatgtttctcagaacgctgcagtctgcaatttgtatgaatt

SEQ ID NO: 8445 - DNA, 160 bp, Protomyxzoa rheumatica
atgtttctcagaacgctgcagtctgcaatttgtatgaattcccgcttccaaccaaatcctcaaaactagccaaatatccacttgcagattccacaaaaagagcgtctcaaaacttctctatgaaaagaaaggttctactcctttagttgaggacacacat

SEQ ID NO: 8446 - DNA, 413 bp, Protomyxzoa rheumatica
ttatatgaagaaatcccgtttccaacgaaggcctcaaatacatccaaatatccagttgctgactttacaaactgagtgtttccaaactgctctatgaaaagaaaggttaaacactgtgagttgaacacacacgtaccaaagtagtttctgagaatgattctgtctagtttgcatacaaagatatttccttttctaccactggcctcaaagctttgaaatctccacttgcaaattccacaaaaagagagtttcatatctgctgtttctaaaggaaagttcaactctgagagttgaatacacaccagaaaaagcagttactgagaagtcttctgtctagcattatatgaagaaatcccatttccaacgaagacttcaaagaggtccaaatatccacttgcagattctgcaaaaag

SEQ ID NO: 8447 - DNA, 93 bp, Protomyxzoa rheumatica
tattttatgtacagtatataatacatactttgggtacttttatatcttatgtacagtatataatacatactttgggtactttgatattttatg

SEQ ID NO: 8448 - DNA, 154 bp, Protomyxzoa rheumatica
atggaatggaatggaatcaacccgagtgcaatggaatggagtggaatcgaatggaatggaatggaacaacccgaatggaatggaatgtaatggagagtaagggagttgaatcgaatcaatccgaatgtaatggaatggaatgcaacggaatgga

SEQ ID NO: 8449 - DNA, 81 bp, Protomyxzoa rheumatica
gaacatatcttttgatttagcagttttgaatttctctttttgcagaatctgcaaggggatgtttggagagctttcaggcat

SEQ ID NO: 8450 - DNA, 81 bp, Protomyxzoa rheumatica
caggatctcactctgtcacccaggatggagtgcagaggcacaatctcagctcagatttcatttcaccattctattccactc

SEQ ID NO: 8451 - DNA, 124 bp, Protomyxzoa rheumatica
agtactttgatattttatgtacagttttttataaatatttgggtgctttcttattttatgtacagtatataatacatactaagcgcactttgatattttatgtacagtatataatacatacttt

SEQ ID NO: 8452 - DNA, 82 bp, Protomyxzoa rheumatica
tattatatactgtacataaaatatcaaagtacccaaggtagatattctatactgtacaaaaaatatcaaagtacccaaagca

SEQ ID NO: 8453 - DNA, 90 bp, Protomyxzoa rheumatica
ctatactgtacaaaaaatatcaaagtacccaaagcatgtaatatatactgtacataaaatatgaaagtacatcaaatatatattttattc

SEQ ID NO: 8454 - DNA, 81 bp, Protomyxzoa rheumatica
tatcttttgattgagcagttttgaatctctctttttgcaggatctacgagtggataattggagaactttgaggcgtactgt

1-2. (canceled)

3. A method for determining whether a sample contains or has an increased likelihood of containing Protomyxzoa Rheumatica comprising:
providing a vessel containing a composition, wherein the composition contains at least one of a first primer and a second primer, and a nucleic acid from the sample, wherein the composition is capable of amplifying, by a polymerase chain reaction, a segment of the nucleic acid to produce an amplicon, wherein production of the amplicon is primed by at least one of the first and second primers,
wherein the first primer is capable of hybridizing under highly stringent hybridization conditions to a polynucleotide consisting of the nucleotide sequence of one of:
any one of the nucleotide sequences set forth in SEQ ID NO:1 through SEQ ID NO:8454;
ATGGCTCATTATATCAGTTATAGT SEQ ID NO:8455; and
CCATGCATGTCTAAGTATA SEQ ID NO:8456; and
wherein the second primer is capable of hybridizing under highly stringent hybridization conditions to a polynucleotide consisting of the nucleotide sequence of one of:
any one of the nucleotide sequences set forth in SEQ ID NO:1 through SEQ ID NO:8454; and
GTTATTATGATTCACCAAACAAG SEQ ID NO:8457;
incubating the vessel under conditions allowing production of the amplicon if the sample contains Protomyxzoa Rheumatica; and
determining that the sample contains pathogen Protomyxzoa Rheumatica if the amplicon is detected or that the sample has an increased likelihood of containing pathogen Protomyxzoa Rheumatica if the amplicon is detected, or determining that the sample does not contain Protomyxzoa Rheumatica if the amplicon is not detected or that the sample does not have an increased likelihood of containing Protomyxzoa Rheumatica if the amplicon is not detected.

4. The method of claim 3, wherein the first primer is capable of hybridizing under highly stringent hybridization conditions to a polynucleotide consisting of the nucleotide sequence of ATGGCTCATTATATCAGTTATAGT SEQ ID NO:8455, wherein the second primer is capable of hybridizing under highly stringent hybridization conditions to a polynucleotide consisting of the nucleotide sequence of GTTATTATGATTCACCAAACAAG SEQ ID NO:8457, and wherein the vessel contains an oligonucleotide probe capable of detecting the amplicon if the amplicon is produced, the probe consisting of the nucleotide sequence of FAM-ACATCCTTT/ZEN/CCGTGAGGTCAGGAGTT-3IABkFQ SEQ ID NO:8458.

5. The method of claim 3, wherein the sample is an extracted sample obtained by one of an expanded extraction method and an enrichment, expanded extraction method.

6. The method of claim 3, wherein the polymerase chain reaction comprises hot start polymerase chain reaction.

7. The method of claim 3, wherein the step of determining comprises aligning nucleotide sequence pairs.

8. The method of claim 3, wherein the step of determining comprises determining a percent identities between one or more primers and the sample.

9. The method of claim 3, wherein the polymerase chain reaction comprises qPCR.

10. The method of claim 9, wherein the qPCR utilizes fluorescently labeled nucleotides to measure levels of amplified product.

11. The method of claim 3, wherein the step of determining comprises use of a probe.

12. The method of claim 11, wherein the probe comprises DNA molecules.

13. The method of claim 11, wherein the probe comprises RNA molecules.

14. The method of claim 3, wherein the sample is extracted using general and specific bacterial, fungal, and protozoal primers.

15. The method of claim 3, further comprising a step of determining mixed populations of organisms.

16. The method of claim 15, wherein the step of determining mixed populations of organisms comprises using bacterial, fungal, and protozoal primers.

17. The method of claim 3, further comprising a step of determining whether bacteria is present in the sample.

18. The method of claim 3, wherein the sample comprises a biofilm matrix.

19. The method of claim 3, wherein the sample is collected from a patient suspected of having a chronic inflammatory or neurological disorder.

20. The method of claim 3, wherein the step of detecting comprises one or more of agarose gel, sequence analysis of the amplification product for confirmation, and hybridization with an oligonucleotide probe.

21. The method of claim 3, wherein the step of detecting comprises detecting a label.

22. The method of claim 3, wherein the step of detecting comprises fluorescence resonance energy transfer.

23. The method of claim 3, further comprising a step of hybridizing under stringent conditions.

24. The method of claim 23, wherein the stringent conditions comprise use of a destabilizing agent.

25. The method of claim 24, wherein the destabilizing agent comprises formamide.

26. The method of claim 3, wherein the method comprises an expanded extraction followed by a Protomyxzoa Rheumatica specific PCR; sample enrichment, subsequent expanded extraction followed by a Protomyxzoa Rheumatica specific PCR; or Protomyxzoa Rheumatica specific PCR.

27. The method of claim 3, wherein the method comprises use of the first primer and the second primer.
